United States Patent Application Publication US 2019/0144922 A1 - sequence listing, part 5

SEQ ID NO: 2 - DNA, 4686137 bp, Escherichia coli (residues 3,124,093-4,686,137 of 4,686,137)
ggtgaaatagtcggtcgtaaactctcttcgcacgatattattcgcgggctgcgtgtcgatggcgtagggacaatgataggcggcacgtttaacagcttcccccacacgtcattttctcaaaacgttggcctggttagcgtgacgcgcgttcatagccgctgggtgtgtatttcttcgggaattatattaatcctgtttggcatggtgccaaaaatggcggtgctggtagcctccattccgcaatttgtgctgggcggcgctggtctagtgatgttcggcatggtactggcgacagggattcgaattctgtcgcgctgtaactacaccaccaaccgttacaacctctatattgtggcgatcagtctcggcgttggcatgactccgacgctctctcacgatttcttttctaagttaccggccgtactgcaaccgctgctacatagcggcattatgctcgcaacccttagcgccgttgtgctgaacgtcttctttaatggctatcagcatcatgctgacctggtgaaggaatccgtctctgataaagatttaaaagtcaggacagtacgtatgtggcttctgatgcgcaagctgaagaaaaatgagcatggagaataatatgaattttttaatgcgcgctatattcagtctgttgttgctttttactctctctattcctgtcatttctgactgtgttgcaatggccattgaaagtcgcttcaaatatatgatgctacttttttaaatggtttttacctgtcggcatccgctcaaaacgggcggttgtcgataaacgctcacttggttaatcatttcactcttcaattatctataatgatgagtgatcagaattacatgtgagaaattatgcaaacggaacacgtcattttattgaatgcacagggagttcccacgggtacgctggaaaagtatgccgcacacacggcagacacccgcttacatctcgcgttctccagttggctgtttaatgccaaaggacaattattagttacccgccgcgcactgagcaaaaaagcatggcctggcgtgtggactaactcggtttgtgggcacccacaactgggagaaagcaacgaagacgcagtgatccgccgttgccgttatgagcttggcgtggaaattacgcctcctgaatctatctatcctgactttcgctaccgcgccaccgatccgagtggcattgtggaaaatgaagtgtgtccggtatttgccgcacgcaccactagtgcgttacagatcaatgatgatgaagtgatggattatcaatggtgtgatttagcagatgtattacacggtattgatgccacgccgtgggcgttcagtccgtggatggtgatgcaggcgacaaatcgcgaagccagaaaacgattatctgcatttacccagcttaaataaaaaaaccccgacatttgccggggttgtgagcataacgtaatgcttattttaccggacgcatcgccgggaacagaataacgtcgcggatggtatggctgttggtgaacagcattaccatacggtcgataccaattcccagacctgctgtcggcggtaagccatgttccagtgcggtgacgtaatcttcatcgtagaacatcgcttcgtcgtcacctgcgtctttcgcggcaacctgatccaggaagcgttgcgcctgatcttccgcgtcattcagctcgctaaagccgttaccgatttcacgaccaccaatgaagaactcaaagcggtctgtgatttccgggttaacgtcgttacgacgcgccagcggagaaacttctgccggatattcagtaatgaaggtcggctgaatcagatgtgcttctgccacttcttcgaagatctcggtaacgatacggcccagaccccagctcttctcaacgtggatgccgatagattcagcaattgctttcgcagagtcgaagttgtccagatccgccatgtcggtttccgggcgatatttcttgatcgcttcacgcatggtcagtttttcgaacggtttaccgaagtccagcgtcacgtcgccgtaggtcacttccgtcttaccgagaatatcctgtgccagagtacggaacagcgattcggtcagctcgatcagatctttgtaatctgcgtaagccatgtagagttccatcatggtgaactctgggttatgacgtacggaaataccttcgttacggaagttacggttgatttcgaatacacgctcgaagccaccaaccaccagacgcttgaggtacagttccggcgcgatacgcaggtacatgtcgagatccagcgcgttatggtgggtgataaacggacgcgcagcggcaccgccagggatcacctgcatcatcggcgtttcaacttccataaagccgcggttcaccatgaactggcgaataccagagaggatctgcgagcgcactttaaaggtgttgcgggattcatcgttggagatgagatcgagataacgctgacgatagcgcgcttcctgatcctgcaagccgtggaatttatccggcagcggacgcagtgctttggtcagcagacgcaactcggtgcagtggatagacagttcgccggttttggttttgaacagcttacctttcgcgccgaggatgtcgccgaggtcccattttttgaactgctcgttataaacgccttccgggagatcgtcacgggcaacgtacagctgaatgcgaccgccaacgtcctgcagggtaacgaaagacgctttacccataatacgacgggtcatcatgcggccagcaacggcgacttcgatgttcagcgcttccagttcttcgttctctttgccgtcgaattctgcgtgcaattggtcagaggtatgatcgcgacggaaatcgttcgggaaggcaatcccctgctcgcgcaggttcgccagcttctcacgacgcgttttcagttcattgttaagatcgactaccgcgtcagcgccctgtgcgtgttgttcagacatgttggttcctcataaccctgctttcaaacttgcttcgataaattgatccaggctgccgtccagcacggcctgcgtgttgcgggtttctaccccggtgcgcagatctttaatgcgggagtcatcaaggacataagaacgaatctggctgccccagccgatgtcggatttgttatcttccatcgcctgtttctcggcatttttcttctgcatctccagttcataaagcttcgctttcatctgcttcatggcctgatctttgttcttgtgctgggaacggtcgttctggcactgggtcacgatcccggtcgggatgtgggtaatacgcaccgcagattcggtacggttaacgtgctgaccgcccgcgccggacgtgcgataaacgtcaatgcgcagatccgccgggttgatttcgatatcaatatcatcatcaacttccggataaacaaacgcggagctgaacgacgtgtggcgacgaccgccggagtcaaacgggcttttacgcaccaggcggtgaacgccggtttctgtacgcagccagccgtaagcgtaatcgccggagattttgatcgtcacggatttaatacccgccacttcaccttccgactcttcgatgatttcagttttgaaaccacgcgattctgcccagcgcagatacatacgctcaagcatgctcgcccagtcctgtgcttccgtaccgccagaccccgcctgaatatcgaggtagcagtcggcgctgtcatattcgccagagaacatacggcggaactcaagctgcgccagtttttcttccagggcgtcgagttcagcaacggcttcgttaaaggtttcttcgtcgtcagcttctacagccagttccagcagaccagaaacatcttccagcccctgtttcatttggtcgagggtgtcgacaacggcttcgagggaggaacgctctttacccagcgcctgtgcgcgttcgggttcgttccagacatccggctgttccagctcggcgtttacttcttccagacgctctttcttggcgtcgtagtcaaagataccccctaagaacgtcggagcgttccgtgaggtcctgaatgcgattatttaccggattaatttcaaacatggtctgatttcttttattgagctagtcaaaatgcggtgataagagcgggattgtacccaatccacgctcttttttatagagaagatgacgctaaattggccagatattgtcgatgataatttgcaggctgcggttgccgcgaaactcgttgatatcgagcttataagccagttgcacttcgcgcacgccgttatccggccagagggcggtatcgacattaaaagcaataccatccagcagtggaccgccgccgaccggttcgaccatcaccttcaaatgacgttcgcccaccagccgctgttgcagcagacggaaatgaccgtcaaacagcggctccgggaacatctgcccccacgggccagcatcgcgcagcagctgcgccacttccatggtcatttcggccgggcttaacggaccgtctgataccacttcgccttgcaatagcgaagggtccagccactcagtaaccagttcgccaaaccgttgttgaaagagtttgaatttatcctcttccagcgacaaacccgccgccatcgcatgaccgccaaacttcagcatcatgccagggtagagtgtgtctaatcgctccagcgcatcacgcatatgcagcccctgaatggagcgaccggaacctttcagcgtaccgtcacctgctggcgcaaacgcgataaccggacggtgaaaacgctctttgatgcgcgaagccagaataccgacaacgccctgatgccattcggggtgatacattgccagcccgccgggtagcgtgtcacggctgcgctccagtttctcgcacagggtcagggcttcaatttgcattccttgttcgatctcttttcgcgtctggtttagcgcatcgagttcatttgccagcacgcgcgcttcgccgatgttgtcgcacaacaacagcgccacaccgacggacatatcgtccagtcgtccggcagcattgagacgtggccccagcgcaaaacctaaatcgctggcggcgagtttttgtgcatcacggtttgccacttcaagcagcgctttaatccccggacggcactttccggctcggatgcgactcatcccctgccaggtcagaatgcgattattagcgtccagcggcacgacgtccgccactgtccccagcgcgaccagatccagcagttctgccaggttaggaattgcgatgttacgctcatcaaaccagccctgatcgcgcaaaaaggtgcgcagcgccagcatcagataaaacgccacacccacgcctgccagtgatttcgacgggaaattacagtcgcgcaagttagggttaatgatcgcttccgctgcgggtaatgtgtcgcctggcaaatggtgatcggtaacaataaccgggatgcccaacgagcgagcgtgctcaacccccgcatgggaggaaataccgttatccaccgtgacaattaactgcgcgccacgggcatgggcctgatcgaccacttccgggcttaagccgtaaccgtcttcgaaacggtttggtaccaggtagtcgatattgctgcaaccaagcgagcgcatcgccagcacgcttagagccgtgctggtcgcgccgtcggcgtcgaaatcaccgaccacaataatccgcgttccttcgcgaaaagcgttgtaaaggatctcaacggccttttcgacgccgctcagttgctgccagggcagcatacctttaacactgcgttccagttcttgcgcactgcgtactccccggctggcgtataaacggcgcagcaagggaggcaattcagcgggcaagtctgccgtttcatcgacttcacggcgacgaagttgtatctgttgtttcacgcgaattatttaccgctggtcattttttggtgttcgtcgaggaattctttcatctctttcggcggctggtaacccggaacaagtgtgccattgctcagcacaactgccggagtaccgctaacgccaagctggacgccaagtgcgtaatggtcggcaatatccacgtcgcaactggctggtgcgacgcttttacctgccatcacatcatcaaacgctttgtttttatctttcgcacaccagatagctttcatttctttctctgcatcgctgtccagcccctggcgcgggaaagcaagataacgcacggtgatccccagcgcgttgtagtctgccatttgctcatgcagtttgtggcagtaaccacaggtaatatcagtaaacacggtgatgacgtgtttttcctgcggcgctttataaacgatcatctctttttcaagcgcattcaactgctttaacagcatcttattggtgacattgaccggagccgtgccactaacgtcatacattggcccctgaatgatatgtttaccatcatcggtgatgtacaacacgccgctgttagtcagaactgtcttcatgccagctacaggcgcgggctgaatatcgctgcttttgatgcccattttggctaacgtttgttgaattgccgcgtcatcagcctgagcaaagcctgaaaacgccgctaacaaagtaaacaacataaaacctttcttcataaatcttcccgttcttttcagacatcacgcccgcgggtgatgctgttgatgaagttgccgcagacgctcggtagcgacatgcgtataaatttgcgtggtggagagatcgctgtggcccagtagcatctgcaccacgcgtaaatccgcaccatgatttaataaatgagtggcaaaagcgtgacgcaacacatgcggtgacagcttttcgctgtcgatacccgccagcacagcataatgtttaatacggtgccagaaggtctgtcgcgtcatctgctgcgcacgctggctgggaaacaacacgtcaattgacacaccattcagcagccacggacgcccatgttccagataggtttccagccagtaaaccgcctcttcacctaacggcaccagacgctctttgttgcctttaccaatgacccgtaccacgccctgacgcaggctgatatcactcattgtcagtccgaccagttcagagacacgcagcccggtagcatacaacacttcaagcatggctttatcgcgtagctccagtggctgatcgattaatggtgcctgtaataaacgttcgacctgcgcttcgcttaaatcttttggcaaacgctggggcaatttcggtgaagcgagatgcgcactgggatcgtcttcacgaaacttttcgcgataaagatactggaacaatcggcgcactgcactcagcaaacgcgctgagctggtggctttatacccgccctccagccgttctgccagtaatgcctgcaaatcgtcactttgcgccgtcgccagcgtcaacccgcggtgatgcaaccactccaccatcattgacagatcgcgacggtaagcgttcaacgtattttcagccagatttttttccagccacagagcatcaagaaactgctcgatgcgtgccagatcctgtttcacttgcgccccttatggtcactcatttgatccattatgccttattgtgccgtgactaaagcgattctgatacactagccgcaaaagccacagcagaatcgagaagcttacgttatgaatatgggtcttttttacggttccagcacctgttacaccgaaatggcggcagaaaaaatccgcgatattatcggcccagaactggtgaccttacataacctcaaggacgactccccgaaattaatggagcagtacgatgtgctcattctgggtatcccgacctgggattttggtgaaatccaggaagactgggaagccgtctgggatcagctcgacgacctgaaccttgaaggtaaaattgttgcgctgtatgggcttggcgatcaactgggatacggcgagtggttcctcgatgcgctcggtatgctgcatgacaaactctcgaccaaaggcgtgaagttcgtcggctactggccaacggaaggatatgaatttaccagcccgaaaccggtgattgctgacgggcaactgttcgtgggtctggcgctggatgaaactaaccagtatgaccttagcgacgagcgtattcagagctggtgcgagcaaatcctcaacgaaatggcagagcattacgcctgatctcactgacggcttagcgcatatgctttgccgtcatctttatctttgcgtctcttgttgcaacaaaatccgccgtaaatcccgccattcagcttcgtccatgctgtcggctgccagccataaatgttgccgtttaccgccatcagaacgtaaacgcagcatcatgccgctcttaatcatccacggtgctttgacgatgctccactcctgcccttgccaacgcaaacgcccgtccatcaacaagcgaatttccccctggcgagcattaatacgccgctggctgcgaacgcaatcaaacaccaccagcgaaagtaacaccatccataacggggtgtaactgagtggccagggcatgagtaaaataacagcggcaaccagcccatgaatcagcaaggaaagccactgtgcgcgccaggagacgcgcaaatcagattgccacaggaccacgttcccggttccgtgtctggatgagtcggaccatcatttccagttctgcatcggccggtttaccgtgattcatcagccagttaaacaggtccggatcgtcacattccagcagacgaataaagatgcgtttttcgtcatcgcttaagctgtcgtactcatgttcgaaaaacggcatgattgaaatatcgagttcgcgcataccacggcggcatgcccaatgaatgcgggctttgttgttaatgtccatcttcttcctgtctcacgaaaatccagtacccggctattgtaacgtgtttttcgccttcttttacgggaatatcagtaaacaccatcgcgatcgcgaaattaattcacaacaattcaatggcttcatttttttggaagtcgcctcgcagaaggcacagatcgcgtagtgaaagcacttgcattgcctcatagctcttttaccattagtcattaatacgccgttaagcaactcaggactctattatggcttttacaccttttcctccccgtcagcctacggcttctgcccgtttaccgctgacgctgatgacgcttgatgactgggcgcttgccaccattactggcgcggacagcgaaaaatatatgcagggtcaggtgacagcagatgtcagccagatggcagaagatcagcacctgctcgccgcccattgcgacgccaaaggtaaaatgtggagcaatttacgtctgttccgcgacggcgatggctttgcatggattgaacggcgcagcgtgcgtgaaccgcagctgactgaactgaaaaaatatgcggtattctctaaagtgaccatcgcgccagacgacgagcgtgtgctgcttggtgttgccggttttcaggcgcgcgccgcgctggcaaatctctttagcgaactgccttcgaaagaaaaacaggtagtcaaagaaggcgcgaccactttgctatggtttgaacacccggcagaacgtttcctgatcgtaaccgatgaagctactgctaatatgctgaccgataaactgcgcggtgaagcggaactgaacaatagccaacagtggctggcattaaacattgaagcgggtttcccggtgattgatgccgccaacagcgggcagtttatcccacaggcgaccaatctccaggcgctgggcggtatcagctttaagaaaggctgttataccggacaagagatggtggcgcgagcaaaattccgtggtgccaataaacgtgcgctctggttgctggcaggtagcgccagccgactgccggaagctggtgaagacttagagctgaaaatgggcgagaactggcgtcgtaccggtacggtactggctgcggtaaaactggaagatggtcaggtcgtggtacaggtcgtcatgaataacgatatggaaccggatagcatcttccgcgtacgcgacgatgcgaatacattgcatatcgagccgctgccgtattcgctcgaagagtaaatctctttatcgcatcaggcatttatcgcctgatgcgacgctggcgcgtcttatcatgtctgggatttgatgcctttatcacaacagggacgaggcccgtagatcggataaggcgttcacgccgaatccggcagttgtgctccgatgcctgatgcgacgctggcgcgtcttatcaggcctacaaaggcatacccattacgcctgcccaatatacaaatagatcgccagaaagtggcacacactaccgccgagcacgaagccgtgccagatggcatggttgtatggaatgcgtttgcagacgtagaaaatcaccccgagcgaataaaccacgccgcctaccgccagtaaggtaacgctgcccgccgcgagcttaactgccatttcataaattaccaccagcgacagccagcccatcgccagataggtcaccagagataaaattttgaatcggtgcgcgatggtcagtttaaacagaatacccagcaatgccaggctccagataacaatcatcaacccgcgcgctaacggagaatccagccccaccagcaaaaacggcgtgtaggttccggcaatcaacaggtaaatagcgcaatggtcaaatttcttcagccacatttttgcccgttgatgaggaatggcgtgatagagcgtcgaagcgaggaacagcaggatcatactgccgccatagaggctgtagctggttatcgctgtggcgctggcattaagatccaccgcctgaaccagtagcaacaccagcccaacgataccaaacaccaacccaatgccgtgactgacgctgttggctatttcctctgccagtgaatatccctgcttaatgaggggcttctgaaccataacttactccggagaaacgtacacgcacatgtatacctctccagcgtaactgagaatagttccagtgaacacctgttagctaaaataaattctgatttgagactaatctcctaaaaatcatgaaattaaatgcgaaatttcaactaacaggcgtgagttcaatttaaagacatttaaattcaatcacataaaattgtgtctgaccgggatagatgtcagcaatgacttttttcagttcagtcagggtcatattttcctgctctgcatgtttttcagtcagcgtatccagcgttacggttgaggttgcggtgacttcaatcgtgcaaaaataaccgtcatcttcaaaacgtccgacacgaagcacatcacccgttttgaagtgcgattcagactcgtcgcggatggtgatggttttacgcccagccagaatgtcatcctggaaacgttgaaaaaaagtgatgtcgtttggctgcatggtactatttcctgtaagaattgactcatctggagcctatgatagtgaaaaaactcaccttaccgaaagatttcttatggggcggcgcagttgccgctcatcaggtcgaaggcggctggaacaaaggcggaaaagggccgagcatttgtgacgttctgaccggtggcgcacacggcgtgccgcgcgaaatcaccaaagaagtcttgccaggaaaatactatccaaaccatgaagccgttgatttttatggtcactataaggaagacatcaagctatttgccgaaatgggcttcaaatgttttcgtacatccattgcctggacgcgcatttttccaaaaggcgatgaagctcagccaaacgaagaagggctgaagttctacgatgatatgttcgatgaactgctgaaatacaacatcgaaccggtgatcaccctctcccactttgaaatgccgctgcatctggtgcagcaatacggtagctggaccaaccgtaaagtggttgatttctttgtacgtttcgcggaagtggtatttgaacgctataagcacaaagtcaaatactggatgaccttcaacgaaattaacaaccagcgtaactggcgtgcaccgctgttcggttactgctgctccggcgtggtgtataccgagcatgaaaacccggaagagacgatgtatcaggtgctgcatcaccagtttgtcgccagcgccctggcggtgaaagctgcgcgtcgcattaacccggagatgaaagtcggctgtatgctggcgatggtgccgctctatccttactcctgtaacccggacgatgtgatgttcgctcaggagtcgatgcgcgaacgctacgtctttaccgatgtgcagctacgcggctattacccgtcctatgtgttgaacgagtgggagcgtcgcggatttaacatcaaaatggaagacggcgatctggatgtgctgcgtgaaggcacctgcgattatcttggtttcagctattacatgaccaatgcagtgaaggccgaaggcggcaccggcgatgcgatctctggttttgaaggcagcgtaccaaacccgtatgttaaagcatctgactggggctggcagattgatccagtaggtctgcgctatgcactttgcgaactgtatgagcgttatcagaggccgctgtttattgtcgaaaacggttttggcgcttacgacaaagtggaagaagatggcagcatcaacgacgactaccgcattgactacctgcgcgcccatatcgaagagatgaaaaaagcggtgacttacgatggcgtggatctgatgggctacacaccgtggggctgcatcgactgcgtgtcgttcaccaccgggcagtacagcaaacgctacggctttatctatgtgaataaacatgacgacggtactggcgatatgtcgcgttcacgtaagaagagctttaactggtacaaagaggtgattgccagcaacggcgagaagctttaagtcgatgaagtaccggatgcaatacttgttgcatccggtcagacaacttccctgttttatttcccgcccgccaaatcgataaaacttcccgtgacgtaagaggctttatcacttagtagccagacaatggcctgcgcgacctcttctgcctgtccaccacgctgcatggggatgttcgacttaacgcgatcgacgcgtccaggctcgccgccgctggcgtgcatttcggtataaataaaccctggccgcacgcagttaacgcggatcccctgcgcggcgacttccagcgatagtccggtggttaacgtatcaatcgcccctttcgatgccgcgtaatcaacatattcccctggcgaacccaaccgtgaggccaccgaagagacattgacgatagcgccgccactgccaccatttttaagcgccatgcgttttaccgcctcgcggcagcagagaaaatatcccgtcacgttggtggaaagtactcggttgattcgctctgcggtaaggttttcaacggtgcactgggtaaacaagatcccggcgttattgaccagcgctgctagcggttcatcgtgctgatcgattgctgtaaacatcgcaacgacctggttttcgtcgctgatatccgcctggagcacgaatgctttgccaccggcttgcgttattaagttcatcacttcctgcgccgcgtggaggttttgctgataattaaccgccaccgtatacccttcttgcgccaacagtaatgcagttgcccgcccgatgccgcgactgccaccagtcacaagtgctatagccatttgtttttccgagaaaaattaattcgttgacgtatctttgagattgctaacaaactggctcaatcttcaatgttggcacgcttttccccctcgccctttcagggagagggccggggtgagggtaaatattcgcgccagtgccggcctgttcccctcaccctaaccctctccccaaaggggcgaggggactgtctgagcacttttgtactttgtcatctgactaaaaaggcgccgaagcgcctttagaaaatagtcgaatcagtgaattactggtattcgctaatcggtacgcaggagcagaacaggttacggtcgccgtaaacatcatccagacgtttcactgtcggccagtatttgtctgccacacctgccgggaataccgcaacttcacggctgtacggatgcgcccactcggcgaccagttcgctctgaatgtgcggcgcgttcaccagcgggttatcttccagcggccagacaccggctttcacctggtcaatttctgcgcggatagccagcatcgcgtcgataaagcgatccagttccactttgctttcagattcagtcggttcaaccatcagcgtacccgccaccgggaacgacatcgtcggcgcgtggaaaccgtagtcgatcaggcgcttggcaatatccagctcgctgatgccggtttcttctttcagcgggcgaatatcgagaatacattcgtgcgccacgcgaccgtcgcgaccggtatacagcaccgggaaggcatcctgcaggcggctggcaatatagttggcgttgaggattgccacctggcttgcttttttcagcccttctgcgcccatcatgcggatgtacatccagctgattggcaggatagaggcgctaccgaacggtgccgcagaaaccgcgccctgacgggttaacatgccttcgatttgcaccacgctatgacccggtacaaacggtgccaaatgcgctttcacgccgatcggtcccatacccggaccaccaccgccgtgcggaatgcagaaagttttatgtaggttaaggtgtgaaacgtccgcaccaataaagcccggcgaggtgatgccaacctgggcgttcatgttcgcgccatcaaggtaaacctgaccgccgaactgatgcacgacttcacacacttcacggatcgtttcttcatacacgccgtgggtagaaggataagtcaccatgatacaggagaggttatcgcccgcctgttccgctttcgcgcgcagatcagtcagatcgatgttgccgtttttatcacacgccacaaccaccacctgcattcctgccatatgtgcagaagcggggttagttccgtgcgcagaagccgggatcaggcagatatcgcgatgcccttcgttgcggctttcatgataatgacgaatcgccagcaggcccgcgtattcgccctgtgcgccagagttcggctgcatacaaacggcgtcgtaaccggtcagtttcaccagccagtcagccagctgcgcaatcatctgctgataaccttcggcctgctccggcgggcagaacgggtgcagttcggcaaattccggccaggtgattgggatcatctcggcggcggcgttcagtttcatggtgcaggaacccagcgggatcatcgcctgattcagcgccagatctttacgctccagcgagtgcatatagcgcatcatttcggtttcgctgtggtagcgattaaacaccggatgggtgaggatttcgtcgtcgcgcagcatcgcaggctggatagagcggctgtcgtgagccacgtctttgtccagcgtgtcgatgtccaggccgtggttatcgcccagcagcacgttgaaaagctgcattacgttttcacgcgtggttgtttcatcaagggtgatcccaaccgcgttcagaatatcgctacgcaggttgatttcagccgcttcggcacgcgtcagtacgcccgctttgtcggccacttccacacacaaggtgtcgaaatagtgcgcatggcgcagtttcagacctttttgttgcaggcccgccgccaggatatcggtcagacggtgaatgcggttagcgatacgtttcaggccaaccgggccgtgataaacggcatacaggctggcgatgtttgccagcagtacctgggaagtacaaatgttggagttcgctttctcacggcggatatgttgctcgcgagtctgcatcgccatgcgcagcgcggtattgccagctgcatctttcgatacaccgataatacggcccggcattgagcgtttgtattcatctttcgccgcaaagaatgccgcgtgtgggccaccgtagcccatcggcacgccgaagcgttgcgccgaaccaaaaacaatatccgcgccctgtttacccggcgcagttaacagcaccagcgccataatatcggcggcaacgctgaccacaattttgcgtgatttcagttcgctaataagcgcagtgtagtcgtgaatttcaccggtagtgcctacctgctgtaacagcacgccgaagacgtcctgatggtcgagcactttttgcgcgtcatcgacaatcacttcaaaaccaaaggtttcggcacgagtacggaccacatccagcgtttgcggatgcacatcggaagccacgaagaagcggttggcatttttcagtttgctgacgcgtttcgccatcgccattgcttcggcggcagcggtggcctcgtccagaagagaagcagaggccatatccagtccagtcaaatccagcgttacctgctggaagttgagcagtgcttcaaggcggccctgggagacttcaggttgatacggagtgtacgcggtataccagcccggattttccagcatgttacgcaggataaccggcggtagctgcacggcggtgtaacccatgccgatgtaagacgtgaagcgtttattgcgactggcaatagccttgagttctgccagtgcggcgtattcggtcgccggtgcgccaacctgcggtggtgtcgcaagttgaatatctttcggcacaatctggccggtcagcgcgtttaacgattgtgcaccaacggcattcagcatttcttgctgttgcgcggcgtccggtccgatatggcgttcaataaaagcgccgctgttttcaagctggcttaacgtctgtgtcatgagcgatggttcctgaaacgtgcagtgaattgtgaacctctctccttacgaagagagtgagggtgaggcataaattttcctcaccctgatcctctcccgcagaagaggaataaagccgttactcgtcttctaacaatgcttcgtatgcggtcgcatccagcagtgattccagttcgctttcatcgctggctttgattttaaagatccagccgcctgcatacggttcgctgttcaccagttccggggaatcgctcagtgcgtcgtttaccgccacgatttcaccgcttactggcgcataaatgtctgacgccgcttttaccgattcggcaaccgcgcagtcatcgcccgcgctaaccgttgcgcccacttccggcaggtcaacaaacaccatatcgcctaacagctcctgagcatgttcggtaataccaacggtgtaagtgccgtcggcttctttacgcagccattcgtgttctttgctgtatttcagttctgctggtacgttgctcatcaatcaatctccaaaaaagtaaatcacgcgacggctttgccgttacgcacaaaaacaggttttgtcactttaaccggcatttcacggttgcgaatttgcacaatcgccgtttcgccaataccttccggcacgcgcgccagcgcaatgctgtaacccagcgtcggggagaaagtaccgctggtgataatgccttcatgctggttgccctgcgcatcggtaaagcgtaccggcagttcattacgcagcacgcctttttcggtcatcaccagaccaaccagtttttctgtaccatgctcacgctgcacttccagggcttcacgaccgataaagtcacgatctgccggttcccaggcgatggtccagcccatgttggcggctaaaggagagatggtttcgtccatctcctgaccataaagattcatgcccgcttccagacgcagcgtgtcacgcgcgcccaagccacatggcttaacacccgcttccaccagcgcacgccagaaatcggccgctttttcattgggcagcgcaatttcatagcccgcttcaccggtataaccagtggtggcaataaacagatcgcccgcctgcacgccaaagaacggtttcatcccttccaccgcctgacgctgggcgtcattaaacagtgtggcagcttttgcctgcgcattcggcccttgcacggcaatcatggaaaggtcatcacgaacggtaatttcgatgccgaaaggttcagcgtgttgggtaatccaggagaggtctttttcgcgggtggcggagttaacaacgaggcggaagaaatcttcagtaaagtagtagacgatgaggtcatctatcacaccgccagaggcattcaacatccccgagtaaagggctttgccgcttttggtgagcttcgccacatcgttcgccagcagataacgcaaaaactcccgggtgcggctgccgcgaagatcgacgatggtcatatgtgacacatcaaacattccggcatcggtacgtaccgcatgatgttcgtcgatttgcgaaccgtaatgcagcggcatcatccagccgtggaaatccaccatgcgagcgccgcaaagcgtgtgttgttcgtacaaaggagtctgttgtgccatcttgtcctcattgaataagcggggctgacaactttttcatggtgaaattatcaccacgaaacccagcatcggagccactcccggtccccaacgcaatcgttctcttttgcctgaacttaccaccgaaacagactgttaaccataaggtaaaattgatcatcacattagcttatggttaaaaaatgcaaaaatcgcgacagaataaaaaaccaaaaaatacaccagtttctatacaaagatgatgtgatgagaaagtcaatttgaataagacaatattaagagctaaaaaaatgtcaaaaaacactaaatcaaaaaataatggcattagaaaatataatgcgaaaacggaggtgaaattagtttatttcaaatgaggaaaatctcccggcgaaaaaaccgggagatgaaagtgtgatgggtatcaaataaacaacagaggagaaatttttaacgcagccattcaggcaaatcgtttaatcccattgcctggcggataagttgcggcttaacgccaggaagcgtgtcggccagtttcaaaccaatatcacgcagcagttttttcgccggattggtaccggaaaacagatcgcggaatccctgcataccagccagcatcaacgccgcactgtgcttgcggctacgctcatagcgacgcagataaatgtactgcccgatgtctttcccctgacgatgcaaccgtttcagttcggcaatcagctctgcagcatccataaagccgagatttaccccctgccccgccagcgggtgaatggtatgtgcggcgtcgcccaccagcgccagacggtgcgaggcaaactggcgcgcataacgccccgtcagtgggaacacctgacgcgcgctctcaaccttgcataagcccaggcgattatcaaaagcgatatttaacgcgcgattaaattcgtcttcacttgcctgctgcatccgctgcgcttcctctggcgacagtgaccagacaatcgagcaaagatgcggatcgctaagcggtaaaaaggccagaatgccttcgccatggaaaacctgccgcgccaccgcatcatgcggttcttccgtgcgaatggtcgctaccagcgcgtgatgctgataatcccagaaagtcagcggaatatcggctttgttgcgcaaccaggaattagcgccgtccgcgccaatcaccagacgcgccgttaacatgctgccatctttcagcgtcaggaaggtttcattttctccccaggcgacctgctgtaattctgcgggggctaacagagtgatatctgacgactgatgcgctttgttccacagcgcgtagtgaatcactgaattttcaacgatatgcccaagatggctatagcccatgctttgatcgtcaaacgaaatgtgaccaaagctgtctttgtcccacacttccataccgtgataacagctggccctacgagagagaatgtcctgccagacgccaagacgggtgagtaatttttcgctggcggcattgatagccgaaacgcgcagttgtggtggtgcattcgccgccagaggttcctgtacgcgctgctccagtacggcaacgcgtaagccgctcccctgtaagccacaggcaaccgccagccccaccatgccgccgccaacaatggctacatcaacactttgcattgtttattccttaaaaccgccttcaacgcgccacccaaccgagggtgcgctgcgccagcacatcgcgtgccggggtgaataattccatcgtcatcagcccgatgttgcgcccgacaaccagcggtgcccaacggttggcaaaaagatgtacaaggctgtccgtgacgccaatggttgcttcgcgatcgctctgtcgacgctgctgataacggcacaatacgccgtaatcccccatgtcttctccgcgctcctgcgcctgagtcagggtttccgcaagactcatcacatctcgcataccgaggttaaacccttgcccggcaatcgggtgcagagtttgcgccgcattgcccaccagcacggtacgatgggtaatagatctggcggcgtgggttaacgccagcggataagcactgcgtttaccagcgtgggtaattttcccaagtcgccagccaaaggccgactggagttcacggcaaaacttctcgtcactccacgacaacacctcttcgcgccgttccagtggatgacaccagaccagcgaacagcgtccgtcagacatcggcaacatcgccagcgggccatgttgcgtaaagcgttcaaaagcgcgcccttcatgcgcaacggaagtagcaacgttggcaatcacggccagttgttcgtaaggctcctgctgccagtcaacgccgcacgcggtggctaacgctgaatgggtgccatcagctgctaccagcacgcggcccgtcagcgtctcgccactctccagcgtcacttcaacgtgactctgagtacgggcaacgttagccacgcgatcagggcaatgcagcgttacgccaggtgctttacgcagcaatgcaaacagccgttgcccgacattgtgcaattcgacaacctgtcccagcgccgccagttggtaatcttctgcggcgagggtgacaaatccagcgtgaccacgatcgctgacatgcacggtggtgatggcagttgcgcaatccgccagagattgccagacgccgatgcgcgccagttgctgacaggtacccgccgccagcgctatcgctcgtccatcaaagcccggatgagcatgtgactctggcgcagtcgcttcaatcaaatgtaccggcagcgccccgtgacttaaccgggaaatagccagcgccagcgtcgcgcccgccatgccgccaccgacgatgattacgctcattgctttctcgcagcaaccatcaacgcttcgatttcttccggctttttcaccacgctggcggtgaggttttcgttaccggtttcggtaatcacaatgtcgtcttcaatacgaatgccgataccgcgatattgttctggcacttctgcatccggcgcaatatacagccctggctctacggtcagtaccatgcccggttccagaatgcgcgagcgatcctgaccataaacacccacgtcatggacatccagtcctaaccagtggctaaggccatgcataaagaaaggacgatgggcgttctgagcgatcagttcatcaacatcacctttcaggatgccgagttttaccaggccgctaaccatgatgcgcaccacttcaccagtgacttccagaatggaagttcccggacgatacaggcgcaggctggtttcgagagactccagcacaatgtcgtagatttcacgctgggcctgggtgaatttgccgttgaccgggaaggtgcgggtaatatcgccagcgtaacctttgtattcacaacccgcgtcaatcaacaccaggtcgccgtcgcgcatttcacactcgttttcggtgtagtgcagaatgcagccgttttcaccgctgccgacaatggtgttataggacggatagcgcgcaccgtggcggttaaattcgtggtgaatttcgccttccagatggtactcgaacattcccggacggcatttttccatcgcccgtgtatgtgccatggcggtgatttctcccgcgcggcggagtacggcaatctcttctggcgatttgaacaggcgcatttcatgaacaacaggacgccagtcgatcatcgttgccggtgcggtgagattttgccgcgaacctttacgcagtttttccagcgcactgttcacgattacatcagcatatgcatattcgccctgggcatggtaaaccacatccaggccgttaagtagttgataaagttgctgattgatttcgctgaatgccagtgcgcggtcaacgcccagtttctctggcgcggcatcctggcctaagcgacggccaaaccagatctccgccgtcaggtcgcgaacgcggttaaacagaacgctgtggttatgagtgtcatcgcttttaatcagcaccagcaccgcttccggttcgttaaagccggtgaagtaccagaagtcactgttctgacgataggggtattcgctgtcggcgctacgtgttacttctggtgcagcaaaaatcagcgcggcgctgccgggttgcatttgctccaccagggcctgacggcgacgctgaaactcttgccgggatatctcactcataacactctccttacgttttttgtttttagtgtagagtcggtttttgtacttctggcgcggtcggttgcggatgagtaaaggtgtcgtggcataacagcgcggcaacacgaacgtattcgatgatctcttcaagcgacatttcaagctcttcctgatcttcgtcttcgtcgtaacccagttgcgcaatgttacgcagatcgtcgatagcttcaccggtttcgccggtcactttatccagcttcggttgcgtaacgccaagaccaagcaggaagtgattgacccaacctgccaatgcatcagcccgatcgaaaacgctgacatcatcgccatcaggcagataaagctgaaaaaggaagccgtcatcctgcagggcatcgctggtggcagagtgcattttacgcagtgcctgtgccagctcatgaccgaaagccatgccttcgttcgtcaggtcgtgaagtagcggtagccatgagctgtcatcgttaccgccacatatcatcccgctgattaaaccatgcatctcagctggggtcagacccgtcccttgttggttcagatactggttcatttcgttgtaaccaggcatttcgttctgtatagacataagcattcgtcgtcaaagggaggaatattcatgatatgctaccactttgggccctggtggaccagaaaagggcttgtctcttctcatcagggtagctatagtgtcgccccttcgcagaccatgggtctaaagacgaaggcagcgcagtcaatcagcaggaaggtggcatgtctgcacaacccgtcgatatccaaatttttggccgttcactgcgtgtgaactgcccgcctgaccaaagggatgcgttgaatcaggcagcggacgatctgaaccaacggttgcaagatctgaaagaacgcactagagtcacaaatactgaacagttggtcttcattgccgcattgaatatcagctatgagttagcgcaagaaaaagcaaagactcgtgactacgcggcaagtatggaacagcgtattcggatgctgcagcagaccatagaacaagcgttacttgaacaaggtcgcatcaccgaaaaaactaaccaaaactttgaatgacacttttcggtttactgtggtagagtaaccgtgaagacaaaatttctctgagatgttcgcaagcgggccagtcccctgagccgatatttcataccacaagaatgtggcgctccgcggttggtgagcatgctcggtccgtccgagaagccttaaaactgcgacgacacattcaccttgaaccaagggttcaagggttacagcctgcggcggcatctcggagattcccttcttatctggcaccagccatgacgcaactaccagaactcccactgacattatcccgacaagaaatccgcaaaatgattcggcaacgtcgtcgtgcgttaacgccggaacaacagcaggaaatgggtcaacaagccgctacccggatgatgacttatcccccggtggtgatggcacatacggtcgctgtattcctctcttttgatggcgaactcgacacccagccactcatagaacaactctggcgcgccggtaagcgcgtatatcttccagttttgcatccctttagtgccggtaatttgctgttcctgaattaccatccgcaaagcgaactggtgatgaacaggttgaagatccatgagccaaaattggatgtgcgtgacgtgctacccctttcccgattagacgtgctgatcacaccgctggtcgcctttgatgagtacggtcagcgcctgggaatgggcggtggtttttatgatcggaccttacaaaactggcagcactataaaacgcaaccggtgggttatgcgcatgattgtcagttggtggaaaaactccccgttgaagagtgggatatccctcttcctgcggtggttacaccgtcgaaagtctgggagtggtaagggcgatacacccgcatcgccctgattgacatcgttgattctttgacctaatttagtgagtaagggtaagggaggattgctcctcccctgagactgactgttaataagcgctgaaacttatgagtaacagtacaatcagtatgatgacaagtcgcatcataacccttctccttcaagccctcgcttcggtgagggctttaccgttacagccccatgctgccctgccatcgtaaatccccattaaataaacacaacgcattgatctgactttgatttattttctggagcagactcgcaaagtagaatgcgcaacgcggcaacggtgtggagaagggataaaaaaacgggcaagtcagtgacctgcccgttgattttcagagaaggggaattagtacagcagacgggcgcgaatggtacccggaatagctttcattgcctgcagcgctttttcggcaacgtcttcgtcggcttcaatatcaataaccacataacccatctgggcggaagtttgcagatattgcgcggcgatgttgacgccctgctcggcgaagattttgttcagcgcagttagcacgcccggacggttttcgtggatgtgcatcagacgacgcccaccgtgcagtggcagcgagacttccgggaagttcaccgcagagagcgttgagccattgtcagaatacttgatcaatttacccgcaacttccaggccgatattctcctgcgcttcctgagtcgaaccgccaatgtgtggcgtcagaaggacgttgtcgaattcacacagcggagaggtaaatggatcgctattggtcgccggttccgtcgggaatacgtcgattgccgcccccgccagatgtttgctcgccagcgcatcacacagcgccggaatatccaccacagtaccgcgcgaagcattaatcagcagcgagccgggcttcattagtgaaatttctttcgcgcccatcatatttttggtggacggattctctggtacatgcagactcaccacatcgctcatattcagcaggtcagaaagatgctgtacctgagtggcgttgcccagcggcagtttattttcaatatcataaaagtaaacatacattcccagcgattcagccagaatgcccaattgcgtaccaatatgaccgtagccgatgatacccagctttttgccgcgcgcttcaaaagaacccgccgccagtttgttccacacgccacggtgcgctttagcattggcttccggcacgccgcgcaatagcagcagcagttcgccaatcaccagctccgcaacagagcgcgtatttgagaacggtgcgttaaataccgggatcccgcgctttgccgccgcatccagatcaacctggtttgttccgatacagaaacagccaatagcgaccagtttttctgcggcgttgatcacgtcttcagtcagatgggtacgggatcgcaggccgatgaagtgggcatcgcggatggattcttttaattgttcatcatccagcgcgcctttgtgaaattcgatgttggtgtaaccagctgcacgaaggctttccagcgccttttggtgcacgccttctaccagcagaaacttaatcttgtctttctccagcgatacctttgccatttacccaatcctgtcttttgaaatgttgtgtgcggatttgcatccgcctttcaacatatcaaaaaataatattgcggcaatatgaacgtttgcgtcgcgatgttgaggaaatatcacgcaaaggtaattcttggatgaatatgctggtttagaggatttatttagagcaatcgacaattgcctggtaaaagcgtgacacatgtcaccaaatttaatgaagagaatttttttaacgggggaggttcccccgtcagatcatttcacaatggttttgacaccgtcaggtgtgccaatcagcgcaacgtccgcgccacggttagcaaacaagccaacagtcaccacgccaggaatcgcatttatggcgttttccatcgctatcgggtcaaggatttccatgccgtggacgtcgaggatcacgttgccattatcggtcaccacgccctgacggtattccggacgaccgcccagtttcaccagctgacgcgccactgcactacgtgccatcgggataacttctactggcagcgggaatttacccagaatatcaacctgcttggaagcgtctgcaatacagataaatttttctgcaaccgaagcaatgattttttcacgggtcagcgccgcgccgccgcctttgatcatttgcatgtggccgttgatttcatctgcgccatcaacgtagatgccaaggctgtcgacttcgttgagatcaaaaacgtgaatgccgaggcttttcagtttttcagtggaagcatctgaactggaaacggccccttcaatctggcctttcattgtaccgagcgcgtcaataaagtgtgcggcggtggaacctgtacctacaccaacaatggtgccgggctgaacatactgaagtgccgcccatcctactgcttttttcaattcatcctgcgtcatgatcgtttcgcctgtggtatgaaatttcacacgcattatatacaaaaaaagcgattcagaccccgttggcaagccgcgtggttaactcatccataaaatatcgcgcaatggcaggcatcccctttcgccccgcaaataaagcatacaacggtctgggtatgccgctccacggtgcaaacaggcgcaccagttcaccgttcgcaagcccctgtttacaggcaaattgaggcaataacgccacgccattcaacacaaccagggcgcgaactcgctgagcgaaatgcattagcgcaaatccctgatcttttaagctgcgcttttaaccacggatacaaatgttacccgccgacggcttcggtatatgcaacctgacacaaaattgtgtcatagtgcaggaaaaagcatttaccaggagcagacaacagcaatgaaacgcccggactacagaacattacaggcactggatgcggtgatacgtgaacgaggatttgagcgcgcggcacaaaagctgtgcattacacaatcagccgtctcacagcgcattaagcaactggaaaatatgttcgggcagccgctgttggtgcgtaccgtaccgccgcgcccgacggaacaagggcaaaaactgctggcactgctgcgccaggtggagttgctggaagaagagtggctgggcgatgaacaaaccggttcgactccgctgctgctttcactggcggtcaacgccgacagtctggcgacgtggttgcttcctgcactggctcctgtgttggctgattcgcctatccgcctcaacttgcaggtagaagatgaaacccgcactcaggaacgtctgcgccgcggcgaagtggtcggcgcggtgagtattcaacatcaggcgctgccgagttgtcttgtcgataaacttggtgcgctcgactatctgttcgtcagctcaaaaccctttgccgaaaaatatttccctaacggcgtaacgcgttcggcattactgaaagcgccagtggtcgcgtttgaccatcttgacgatatgcaccaggcctttttgcagcaaaacttcgatctgcctccaggcagcgtgccctgccatatcgttaattcttcagaagcgttcgtacaacttgctcgccagggcaccacctgctgtatgatcccgcacctgcaaatcgagaaagagctggccagcggtgaactgattgacttaacgcctgggctatttcaacgacggatgctctactggcaccgctttgctcctgaaagccgcatgatgcgtaaagtcactgatgcgttactcgattatggtcacaaagtccttcgtcaggattaatccatcaaataatgcctgatagcacatatcaggcgttgtcctcacttctttttgtattccttgaatcacatcacaaaatagacaaatctcaggcggcaaaaaacgacgtctgaatgcattttttttgctggcgacaaacccacgtaaaaagctcaccgtaggcgcaaataccctcattttgattgcgttttacggagcaaataatgtctaacgtgcaggagtggcaacagcttgccaacaaggaattgagccgtcgggagaaaactgtcgactcgctggttcatcaaaccgcggaagggatcgccatcaagccgctgtataccgaagccgatctcgataatctggaggtgacaggtacccttcctggtttgccgccctacgttcgtggcccgcgtgccactatgtataccgcccaaccgtggaccatccgtcagtatgctggtttttcaacagcaaaagagtccaacgctttttatcgccgtaacctggccgccgggcaaaaaggtctttccgttgcgtttgaccttgccacccaccgtggctacgactccgataacccgcgcgtggcgggcgacgtcggcaaagcgggcgtcgctatcgacaccgtggaagatatgaaagtcctgttcgaccagatcccgctggataaaatgtcggtttcgatgaccatgaatggcgcagtgctaccagtactggcgttttatatcgtcgccgcagaagagcaaggtgttacacctgataaactgaccggcaccattcaaaacgatattctcaaagagtacctctgccgcaacacctatatttacccaccaaaaccgtcaatgcgcattatcgccgacatcatcgcctggtgttccggcaacatgccgcgatttaataccatcagtatcagcggttaccacatgggtgaagcgggtgccaactgcgtgcagcaggtagcatttacgctcgctgatgggattgagtacatcaaagcagcaatctctgccggactgaaaattgatgacttcgctcctcgcctgtcgttcttcttcggcatcggcatggatctgtttatgaacgtcgccatgttgcgtgcggcacgttatttatggagcgaagcggtcagtggatttggcgcacaggacccgaaatcactggcgctgcgtacccactgccagacctcaggctggagcctgactgaacaggatccgtataacaacgttatccgcaccaccattgaagcgctggctgcgacgctgggcggtactcagtcactgcataccaacgtctttgacgaagcgcttggtttgcctaccgatttctcagcacgcattgcccgcaacacccagatcatcatccaggaagaatcagaactctgccgcaccgtcgatccactggccggatcctattacattgagtcgctgaccgatcaaatcgtcaaacaagccagagctattatccaacagatcgacgaagccggtggcatggcgaaagcgatcgaagcaggtctgccaaaacgaatgatcgaagaggcctcagcgcgcgaacagtcgctgatcgaccagggcaagcgtgtcatcgttggtgtcaacaagtacaaactggatcacgaagacgaaaccgatgtacttgagatcgacaacgtgatggtgcgtaacgagcaaattgcttcgctggaacgcattcgcgccacccgtgatgatgccgccgtaaccgccgcgttgaacgccctgactcacgccgcacagcataacgaaaacctgctggctgccgctgttaatgccgctcgcgttcgcgccaccctgggtgaaatttccgatgcgctggaagtcgctttcgaccgttatctggtgccaagccagtgtgttaccggcgtgattgcgcaaagctatcatcagtctgagaaatcggcctccgagttcgatgccattgttgcgcaaacggagcagttccttgccgacaatggtcgtcgcccgcgcattctgatcgctaagatgggccaggatggacacgatcgcggcgcgaaagtgatcgccagcgcctattccgatctcggtttcgacgtagatttaagcccgatgttctctacacctgaagagatcgcccgcctggccgtagaaaacgacgttcacgtagtgggcgcatcctcactggctgccggtcataaaacgctgatcccggaactggtcgaagcgctgaaaaaatggggacgcgaagatatctgcgtggtcgcgggtggcgtcattccgccgcaggattacgccttcctgcaagagcgcggcgtggcggcgatttatggtccaggtacacctatgctcgacagtgtgcgcgacgtactgaatctgataagccagcatcatgattaatgaagccacgctggcagaaagtattcgccgcttacgtcagggtgagcgtgccacactcgcccaggccatgacgctggtggaaagccgtcacccgcgtcatcaggcactaagtacgcagctgcttgatgccattatgccgtactgcggtaacaccctgcgactgggcgttaccggcacccccggcgcggggaaaagtacctttcttgaggcctttggcatgttgttgattcgagagggattaaaggtcgcggttattgcggtcgatcccagcagcccggtcactggcggtagcattctcggggataaaacccgcatgaatgacctggcgcgtgccgaagcggcgtttattcgcccggtaccatcctccggtcatctgggcggtgccagtcagcgagcgcgggaattaatgctgttatgcgaagcagcgggttatgacgtagtgattgtcgaaacggttggcgtcgggcagtcggaaacagaagtcgcccgcatggtggactgttttatctcgttgcaaattgccggtggcggcgatgatctgcagggcattaaaaaagggctgatggaagtggctgatctgatcgttatcaacaaagacgatggcgataaccataccaatgtcgccattgcccggcatatgtacgagagtgccctgcatattctgcgacgtaaatacgacgaatggcagccacgggttctgacttgtagcgcactggaaaaacgtggaatcgatgagatctggcacgccatcatcgacttcaaaaccgcgctaactgccagtggtcgtttacaacaagtgcggcaacaacaatcggtggaatggctgcgtaagcagaccgaagaagaagtactgaatcacctgttcgcgaatgaagatttcgatcgctattaccgccagacgcttttagcggtcaaaaacaatacgctctcaccgcgcaccggcctgcggcagctcagtgaatttatccagacgcaatattttgattaaaggaatttttatgtcttatcagtatgttaacgttgtcactatcaacaaagtggcggtcattgagtttaactatggccgaaaacttaatgccttaagtaaagtctttattgatgatcttatgcaggcgttaagcgatctcaaccggccggaaattcgctgtatcattttgcgcgcaccgagtggatccaaagtcttctccgcaggtcacgatattcacgaactgccgtctggcggtcgcgatccgctctcctatgatgatccattgcgtcaaatcacccgcatgatccaaaaattcccgaaaccgatcatttcgatggtggaaggtagtgtttggggtggcgcatttgaaatgatcatgagttccgatctgatcatcgccgccagtacctcaaccttctcaatgacgcctgtaaacctcggcgtcccgtataacctggtcggcattcacaacctgacccgcgacgcgggcttccacattgtcaaagagctgatttttaccgcttcgccaatcaccgcccagcgcgcgctggctgtcggcatcctcaaccatgttgtggaagtggaagaactggaagatttcaccttacaaatggcgcaccacatctctgagaaagcgccgttagccattgccgttatcaaagaagagctgcgtgtactgggcgaagcacacaccatgaactccgatgaatttgaacgtattcaggggatgcgccgcgcggtgtatgacagcgaagattaccaggaagggatgaacgctttcctcgaaaaacgtaaacctaatttcgttggtcattaatccctgcgaacgaaggagtaaaaatggaaactcagtggacaaggatgaccgccaatgaagcggcagaaattatccagcataacgacatggtggcatttagcggctttaccccggcgggttcgccgaaagccctacccaccgcgattgcccgcagagctaacgaacagcatgaggccaaaaagccgtatcaaattcgccttctgacgggtgcgtcaatcagcgccgccgctgacgatgtactttctgacgccgatgctgtttcctggcgtgcgccatatcaaacatcgtccggtttacgtaaaaagatcaatcagggcgcggtgagtttcgttgacctgcatttgagcgaagtggcgcaaatggtcaattacggtttcttcggcgacattgatgttgccgtcattgaagcatcggcactggcaccggatggtcgagtctggttaaccagcgggatcggtaatgcgccgacctggctgctgcgggcgaagaaagtgatcattgaactcaatcactatcacgatccgcgcgttgcagaactggcggatattgtgattcctggcgcgccaccgcggcgcaatagcgtgtcgatcttccatgcaatggatcgcgtcggtacccgctatgtgcaaatcgatccgaaaaagattgtcgccgtcgtggaaaccaacttacccgacgccggtaatatgctggataagcaaaatcccatgtgccagcagattgccgataacgtggtcacgttcttattgcaggaaatggcgcatgggcgtattccgccggaatttctgccgctgcaaagtggcgtgggcaatatcaataatgcggtaatggcgcgtctgggggaaaacccggtaattcctccgtttatgatgtattcggaagtgctacaggaatcggtggtgcatttactggaaaccggcaaaatcagcggggccagcgcctccagcctgacaatctcggccgattccctgcgcaagatttacgacaatatggattactttgccagccgcattgtgttgcgtccgcaggagatttccaataacccggaaatcatccgtcgtctgggcgtcatcgctctgaacatcggcctggagtttgatatttacgggcatgccaactcaacacacgtagccggggtcgatctgatgaacggcatcggcggcagcggtgattttgaacgcaacgcgtatctgtcgatctttatggccccgtcgattgctaaagaaggcaagatctcaaccgtcgtgccaatgtgcagccatgttgatcacagcgaacacagcgtcaaagtgatcatcaccgaacaagggatcgccgatctgcgcggtctttccccgcttcaacgcgcccgcactatcattgataattgtgcacatcctatgtatcgggattatctgcatcgctatctggaaaatgcgcctggcggacatattcaccacgatcttagccacgtcttcgacttacaccgtaatttaattgcaaccggctcgatgctgggttaatgactcgtcccgtcacgatcttcagcaatatgctgaagcatcgtggcggtataacgatgatttctgattgaataaagatattcctgcatatacatcggcctgtgcggtgcatcaaaatatttcagcgttgccggattcaccagtcgccaggcaaaatgcgggatcaccgtcagaaaatgtccgcgctccacggcgctgattttggccataaaactgtagggacgataaataatggttggattgatcccacaaggtcgcatattcgcatcaatcattgcttcgaagttggcccggttctgaaagcgcatttgtagccagggcagctcctgaagcagctcttgctcttgtcgctcttcataacggcgagaaacgagaaagcctaatcgcagcggtggtagttcactgatagtcaggttttccagttcctgaactcgtgcagatacatgctgtggggagataataaaatctaactggcggtcaaaaagattatcgataacgccattttcgctgaactcaactggctgggcggtcacgccttcatacttatctccgagactaatcaactgatcgaaaataattgtcggataagtattatctatgccaatcacaatttctcgtgaacgacgccctgagttatggatttcattatcaatcgcagaaagccgttgataaaccgggaacagtttttgatacagttcctgtccggctttattgaggctgatattattatctttgcgggtaaatagcgtatagccaatttgttcttccagcgcggcaatgcttttaccaaatggcgaagccgtcatatggattttttctgccgcccgggcaatattattggtttgcgctaataaaatgaaattgcgcatctttttcgaaataaaaatgtccatccccctcccccgcatccttgtccgcttaaccgtttcagtcagcctatccttgatgaaaccgcgagcaaagataggtgattacgtcatggttttacagaaaattacagaaaaaggaggcaatatcgggtaaaggcattagcccgacgaatacgtcgggctacaaatattattgtgctgcaggtgttttagcgggttgttgatccacaggttctaactggaagaccacatcgacctgatcatcaaactgaatagcggcctgctcgtaagtttcctgggcggacaccggcgcggcatcggctttcatcatccgcaccattgggctgggctgatagttggaaacatggtagcgcacgctatataccggccccagtttacgatgaaagccgttcgccagttcctgcgcctgatgaatcgcgttatcaatcgctgccttacgcgctttgtctttataggcatccggctgcgccacgcccagcgacacagaacgaatttcgttaagacccgccttcagcgcgccatccagcaaggaattcagtttgtctaactgacggagcgtgacttccaccgttctcacagcgcggtagcctttaaggatacttttaccatcctgataatcataatctggctgggtgcgtaagttcgctgagctgatatcttttttcgcgatctgattgagttcaaggaaggaaatgtattgtgcgacgcgctcatctgcctgtttcttggcagtagcggcatccttcgcggccacgttaacttcaatcgcaagagtggcaatgtctggcaccgcatccacgcttgccgtaccggaggtgacaatatgcggtccatccggcaattcgttagcctgcgctgccatcccgctaatacccattaatgccgccagggcgataactttgaacttcacgttagtctctccgtgttaattgacttgcccaaaattcaggacctctggaggcaagcttagcgcctctgttttatttttccatcagatagcgcctaactgaacaaggcttgtgcatgagcaataccgtctctcgccagctgcaaggcaataaaccacataacacatcccacaaccagattgataatgcgctgtgcttttgccgtgcgcagacgcggtgccagccaggctgcgagaagagccagaccaaagaaccacaggaaagaggcgctaattgtcccgagtgcaaaccagcgttttggttccacatcaagttgcccgccaaggctgcccagtacaacaaaagtatccaggtaaacatgcggattcagccaggtcactgccaacatggtggcgataattttccatctgccttgcttcatgacttcggcgctggctaactcaatattactgctcattgctgttttaaaagcgccaaaaccataccacagcaagaaggctacgccgccccaggtgaccagcgccagcaaccacggcgactgcatcaataacgcgctgccaccaaaaatcccggcgcaaatcaggaccaaatcgctgatagcacaaagtaaggcaatcataatgtggtactgacgacgtatgccctgattcatcacaaaagcattttgtggaccgagcggtaggatcatagccgccccaagtgcaagaccttgaaagtaataagaaaacacgttggatattccgaattaagtatctgatgcagagactatatcgcgggattgttattagcggaaattgataatattaattggcaatcagaaaaactaataagagagaggccagagagtattatctggcctcagcgttgattacgcagctttgtcttctttcacccgcttaaagttcacatccatttgcgggtacgggaagctgataccggcggcatcaaattcacgtttaatacgctccagcacatcccagtacacgttttgcagatcgccgctgttgctccagacgcggaccacgaaattaatcgacgatgcaccaagttcgttcaggcgcacagtcatttcgcgatctttcaaaatgcgatcttcagactggataatattggtcaggatctgcttaacctgatcgatatcggaatcatacgccacgccaataataaattcgttacggcgaactggctcgcgggagaagttaataatatttccggcaataattttaccgttcggaataacgataattttaccgtctgcagtacgcatggtggtggagaaaatctgcacactcagcacagtaccggctacgccgcccaggtcaacatattctccggcacggaacgggcggaacatgacaagtaacacgccagcggccaggttagacagtgacccctgcaaagccagaccaacagctaagcctgcggcaccgagtacagcaatgactgacgcggtttgtacacccacgcgtcccagtgcagcgattagcgtaaaggcgataataccgtaacggactaatgcagaaagaaaatcagcaacagtggcatcgattttacgggagatcatcaggcgattcaccgcgttggaaatcatccgcgcgataatcaaaccaacgatgatgatcgcgagtgccgccacgatgtttactgcataacttagcagcagcgcctggttagctaccagccagcttcccgcgccgtttatgctatcgacaacattcaaatcttccattcaatattccttttcaactgactcaaaatggagaaatacactccgccgccttatgacgggcagtctgacaagggtaaacaataaagcataattttgccaaatagatcacagatttctcatctgaatcaccttgcttttggcgaaaaaatccccgcagagcggggctcagacagatatcaatgtgcgctttgtcatgccggatgcggcgtgaacgccttatccggcctacaaaaacctgcaaattcaatatattgcaggatacgtgtaggcctgataagcgtagcgcatcaggcaattttgcttttggcgaaaaaaagacccgcagagcgggccttgagataagcagaaaggaatatcttacagaacgtcgatcgcgttcagttcctggaatgctttctccagacgagcgatcatcgaagtctgaccggcacgcagccatacgcgcggatcgtagtatttcttgttcggctgatcttcgcctttcgggttacccagctgaccctgcagataagcttcgttcgctttgtagtagttcagaacgccttcccaggttgcccattgggtatcggtatcgatgttcatttttactacgccgtagcttacggagtctttgatttcctgagcagtagaaccggaaccaccgtggaatacgaagttcaggctgttgtgcggcaggttgtgtttcttggaaacatattcctgagaatcacgcaggatggtcggagtcagaaccacgttacccggcttgtaaacaccgtgtacgttaccgaaggacgctgcgatggtgaaacgcgggctgattttgctcagttcggtgtatgcgtaatcaacgtcttccggctgggtgtacagtgcagaagcgtccatgtggctgttgtccacgccgtcttcttcaccaccggtgcaacccagttcgatttccagagtcatgccgattttggacatgcgctccaggtatttagagcagatttcgatgttctcttgcagagattcttcagacaggtcgatcatgtgagaagagaacagcggcttaccggtagctgcgaagtgtttttcacccgcgtccaacagaccgtcgatccacggcagcagtttcttcgcgcagtggtcagtgtgcaggataaccggaacaccataatgttcagccatctggtgaacgtgatgcgcaccagagatcgcgcccaggatagcagcaccctgcggaacgtcagatttcacgcctttaccagcgataaaggaagcaccaccgttggagaactgaacgataaccggcgctttaactttagcagcggtttccagtacggcgttgatggagtcagtaccgacgcagtttactgctggcagtgcgaagttgttttcttttgctacctggaaaactttctgtacgtcatcaccagtgattacgccaggttttacgaaatcaaaaatcttagacatgtctcttgtcctgtatcgtcgggccttatactcgtcatacttcaagttgcatgtgctgcgtctgcgttcgctcaccccagtcacttacttatgtaagctcctggggattcactctcttgtcgccttcctgcaactcgaattatttagagtatgaaaaattgcgtgctctaaaagcgcgctgaaacaagggcaggtttccctgccctgtgattttttacttcttagcgcgctcttcgagcatcgctactgcaggcagtactttaccttccacgaattcgaggaatgcgccgccgccagtggagatgtaggagattttgtcagcaatgccgaacaggtcgattgctgccagagtgtcgccgccgccagcgatggagaacgcttcgctgtctgcgatagcgttagccacgatttcagtacctttgcggaagttcgggaattcgaacacgccaaccggaccgttccacagaatggttttcgcattcttcaggatttcagccagttcctgagcggaagcatcaccgatatccaggatctgctcgtcagctttcacatcgttaacagatttcagggtagccggtgcagtttcagagaactcggttgctacgcgaacatcagacggaaccgggatgttgcaggtggtcagcagacgtttagcttcgtcaaccaggtcagcttcgtacagggatttacccacatcgtggccttgtgccgcgataaaggtgttagcgataccaccaccaacaatcagctggtcagcgattttagacagggagtccagaacggtcagtttggtagatactttagaaccaccaacgatagccaccatcgggcgagcaggttctttcagtgctttacccagcgcgtccagttcagctgccagcagcgggcctgcgcacgcaacgtcagcgaatttaccgataccgtgagtagaagcctgcgcgcggtgagcagtaccgaatgcgtccattacgaacacgtcacacagtgcagcgtattttttggacagggtttcgtcgtctttcttctcgcctttgttgaagcgaacgttttccagaacaaccagttcaccttcagcaacgtcaacgccgtcgaggtaatctttaaccagacgaaccgggttagacagtttgtctttcaggtagttaacaaccggcagcagagagaattcttcgttgtactcgccttcggtaggacgacccaggtgggaagttaccatcacttttgcgccttgtttcagggccagttcgatggtcggcagagaagcacggatacgcgcgtcgctggttactttcccgtcttttactggtacgttcagatccgcacggataaatacacgtttcccagcaagatccagatcggtcatcttaattacagacatggtgaatcctctcgttgattctaaaagttttgcagacgctgcttgcgtcttacctgaaagcaacagtagccatagctaacgtcgtgtcgagcattcggttagcaaagccccattcgttatcgcaccagaccaacgttttgatcaggtgtgcgccactgacccgggtttgggtgccatcgacaatggcactgtgcggatcgtggttaaaatctacagagaccaacggcaattccgtatagtcaactataccatgaaatgcaccttgtgctgctttttgcagcaacaggttgacttcattggcttttacaggtttcttcaccgtcacgcttaaatcgattgccgtcacatttatggttggcacacgtaccgcaatcgcttcaaagcgatcgttaaattgcggaaaaaatcgtgtgataccggcggccagtttagtatcgaccggaatgatcgactggctggctgcccgggtgcgacgcaggtcaggatggtatgcatcaataacctgttgatcgtgcatggcggagtgaattgtggtcacagtgccggactcaataccgtacgcatcatctaacaatttgatgacgggaattatgcaattcgtggtacaggaagcgttagaaacgatgcggtgttccgcacgaagttgatcctgattgacgccgtaaacaacggtcgcgtcgagatcgttactgccaggatgtgaaaagagcacttttttggccccggcggcaatatgcgcttcgccatgctcgcgggagccatatacgccggtgcagtcgaggactacatcaacgccaagttcacgccaggggagcgattgcagtgaacgttcatgcaatacgcggatggcgtcatcaccaacaaaaagttgatcgcgttcctgtcgtacttcccatgcaaaacggccatggctggtgtcatatttcaacaaatgcgccatgcccgcagcatccgccagttcgttgattgccaccacggtaatttccgcccggcgtccggattcatacaaagcacgaaccacattacgcccgatgcgaccgaagccatttatcgctacgcgtacggtcatagatctcctgcaaggttttccctgagcaaatttgccagacagagtaatccagcaaatcgtccggggaaaccttacctgtcgcaaactgcgactgattggttaattgtcgaacatttaatcgactgaaacgcttcagctaggataagcgaaacgtggaataaaaggaatgtttgtccagccgaagaagacatttatctgactcacatcacacttttatccccttttgtgggaagctttattccaggctggcgtaataataaccctacaataactggaataaattgtcagcttgtgaagtgataccggccttcttcagtcatctctactatcagattggcctgacggctattcatcagcacacgctcgacattggggccatcggtgcgggcataaaatgcttcggctacttgccgcgttaatcctcccgcaattttacgactaatcaagcgctcccgcagaatttgagcaggtgcatgaataaaaatagaaaaatcgcagaaagatgccaactccagccacttttcatcatccagtaacaaccagtttccttcgacgatgacgagtggtgcggtaacgtgcaacgcatcttcaacaggatcatgcttttgtcgatcgtactgcggccacgtacaatccccttccacgacctggcgcagattttccgtcagtttcgcaacgtcaaatgtctctggtgcgcctttgaaggggcgcaattgatgcgcatccagccagctattgtaatggtgaaaaccatccatcgggagcgtctgaatagcgggcagttccgggtcttgttgcgcgagatattcccagaaggtggttagggttgatttacccgtccccggcggagcgcaaagaaaaaccaccgtacgccgctgcggatttaccgtctgtaaggccgccaacatgtgcagcaacggtttatgtacattttcaatctcttcgttctggtactgtgcctgtatcttcagcccattcaccgttaattcaattttcacggcgttaattcctttaaggtggtcgttactgccagcgtcagcgccgttttgaccattccgctaaaacgcgcctctgaccagacggagaaatcagcgaacttcatcgcttttaacgcgtcatagagcatcgcattgcgggttatgctattgacgttgctgataaaatcccaggtcatgtcatcggcaaatccgggcgtttcatcctgttcgttcaggtaatgccagaactgggaaaaatgcgtgatatcggcgtacaaccatttatccattttccccaacgcataaatcaaacgcagtgcaacatcaatatcgtcaagcgggccgctttgggcgagtaacggcttcactgcatattccacgatctcttcatcgttatcgacaaacagcgacggcagaaactggcgtatcccctggagcaaaatggtatgcgcagttttcataaatgaaaataaattgtcctgtgcatccagttgctcaagcacatcatcttctgtcagcgtcgccattggtcttccgatagatcaccatcaatgcagggagtctattatattacacgtttggtccgcgccgccgatcagtaatgtctgcgtccgcaccccattcgccgtctgttggataccgttcaccagctcaccgcccgtcacgcccgtagcgctaaagaggatatcgttccccctcaccagttcatcgagcgagtacacacggttaacgtcaacgcccattgccttgcaacgcttgcgctcctgctctgcaatctgccgattttccgtgtaatcccctttagcctggcaaaagtcaatcagctcggcctgcatatccccgcctaatgctttaacggcacaggcagaaatcacgccttctggcgcaccgccgatggtgtacatcacatcgtaaggattatcctgccagcaggtcagcacgctggcggcgacatcgccatccggcagggcaaaaaccttcacgcccagctgtgttgcttcctcaatcgcggcactcaggcgcggtttatccagcgtaaccatgcgcagcttatccagcggtttgcctaacgctttcgccacgttgcgcaggttgtccgtcagaggcaaagacagatcaatcgcgcccgccgccagccgattaacaaccagctttttcatatacatatcgggcgcatgtaacaggctatctcgaggggcgaaagccatgaccgccagcgcattgctctgccccatcgccaccatccgcgtgccttcaatgggatcaaccgcgatatcgacttctggcccatcgcctttgcccacctcttcgccaatccacagcatcggcgcatggtcaatttctccttcgccgataaccactcgtccacgaaaagcgacgtcgtttaatgcctggcgcatcgcggtgaccgccaggccatcaattttatttttgtcgccacatccggtttgcggccaggcagccaacgctgcctgttccgtaacgcgaaataatggccacgccagggacatcattgcgcggcctccccgatatcaacgccaaattgtgccagcagatatttctcggcctgttcattccagatgccgtgcgtttcctcaaccagccgcgccaactctttaaacagcggatcggttttgcctttttcggcaaaatcggcaatggcagtgagcggcatggtcacgccgttataaatgagttttttaccgccagggatatccggcagattgagcacggtttctggcaccgcatccaggccaccgatatgggtcaccataaacgacggctgtaactgcccagtggcgctaagggcaatcgcctctttcatgtcgtccgttgaaccgccagatgtaccgacgacgtgcgtgctgttgtaatggacgttgtagaaattaaacggcactttgaagtttttatccgtcggcccggcaaagaagttcagacagccatcttccgccagtaattcatcagccatctcaacgacagcaggcaccgccgcataaacaaaaatgtcatcgaacccggcatctcctgtcagcgcccgcagcatctggacaggatcgctcatccctttggtattcacatacaccagctcaatgcctttactggccgccagttccaccggcagcagcttctgtacctgcgccagacgtttgtcgtcgatatcgaccaccaccacccgcgacggttgtatgccgccgttaatggcgtaatcgatagcgccaatgcccatcggacctgcacacgccagcagtgcaatattgccgccaggtttgacgcccatgcgatgctcataaacatattgcgtggtgtgataattggcatgataagcaccaataatgcagcacataggctctgccagcgacgccgcagcaaaataagagccgtgatacggtaatacgcagcccaaattaatggcgatttcgggaataatcatataagtggcattgccgccaaaatattcgtagctgtagcccgctgaatatccgcttggtaaccccatcgccggttgcaatacaaaacgctggccttttttatatttgccagtgagatttttacccacttcgacaataaccccggcacattcatgcccggtaatgaccggatgattttctaaatcgtcgggtacgcgtttatgttcactaccgagtaacgccgctttccaggtcgataaacagacgctgtcagaaattacactcaccagtaattcattatcggtaatttctggcagttcaaatacgcgcagacggacatcccgcttgccataaatagcagcaactttggttttcatttttacctctgtaatcagtgtttatgttcggcggttaattgattaaataaagtgtcgagttttggatcgccaatatagttattaatcaatatcagtggtttatccgtcacacgtttcacgcgcccttccagactggcatgagtaacgacgatatccgcatccgcaggcacgttttctatggcgtaatgttttacttcaattgccagccccgctttttccaggcgtttacggaaggtggtcgcgcccatcgcactggagcccatccccgcatcgcaaacaaaggcgatacgcttaaccctgcttaacgagaatgcaccctcttgtttcatcgccttaaccgcattggctgactgagcaaactcatcttcgctctccgtttccaccgttttttccatcttcagtatcagcgaagtaatagcaaaggacaccagggtacctaccgtaacaccggcaattgtcgccaggaacgagcctttcggcgtcagtgccaggtaagcaaagatagaccccggacttgggccagccaccagaccaccgtccagtaagttaaacatccaggtgccagacataccgcccgcaatcatggcaataatggtcagcggcttcatcagcacatacgggaaatacagttcgtggatcccaccgaggaagtgaataatcatcgccccgggcgcagaacgtttactcatccctttaccaaacaaggtaaacgccagcagcagccccaggcccggacctgggttagaggccaccataaagaagatggatttaccgttaaccgaagcctgttgcattcccagcggataatagacgccctgatcgatcgcattattgaggaaaagcactttcgccggttcattgatgactgacaacaatggcagataacccgcatgtaccagcgcctcaatacactctttgacgaaagtattggcaattaacaccgccgggccgataacttcaaaacccagcagacaaaggagcatccccgcgatacctaatgagaagttattgataaccatctcaaaaccggcaggtatgcgtttttccagtgccttatcgacatattttatgaccaacccaccgagcggccccatgatcattgagccaaggaacatcgggatctctgcgccaacgatcacaccaatagtacctattccgcccatgaccgccccgcgtttaccgccgaccagatgaccacctgtagaaccaatcatcacgggcaataaataggtaatcatcgggccgacaattttggcgaaatgttcgttagggaaggtgcgaacaagtccctgatatgagatcatgtttgtcatctggagccatagaacagggttcatcatgagtcatcaacttaccttcgccgacagtgaattcagcagtaagcgccgtcagaccagaaaagagattttcttgtcccgcatggagcagattctgccatggcaaaacatggtggaagtcatcgagccgttttaccccaaggctggtaatggccggcgaccttatccgctggaaaccatgctacgcattcactgcatgcagcattggtacaacctgagcgatggcgcgatggaagatgctctgtacgaaatcgcctccatgcgtctgtttgcccggttatccctggatagcgccttgccggaccgcaccaccatcatgaatttccgccacctgctggagcagcatcaactggcccgccaattgttcaagaccatcaatcgctggctggccgaagcaggcgtcatgatgactcaaggcaccttggtcgatgccaccatcattgaggcacccagctcgaccaagaacaaagagcagcaacgcgatccggagatgcatcagaccaagaaaggcaatcagtggcactttggcatgaaggcccacattggtgtcgatgccaagagtggcctgacccacagcctggtcaccaccgcggccaacgagcatgacctcaatcagctgggtaatctgctgcatggagaggagcaatttgtctcagccgatgccggctaccaaggggcgccacagcgcgaggagctggccgaggtggatgtggactggctgatcgccgagcgccccggcaaggtaagaaccttgaaacagcatccacgcaagaacaaaacggccatcaacatcgaatacatgaaagccagcatccgggccagggtggagcacccatttcgcatcatcaagcgacagttcggcttcgtgaaagccagatacaaggggttgctgaaaaacgataaccaactggcgatgttattcacgctggccaacctgtttcgggcggaccaaatgatacgtcagtgggagagatctcactaaaaactggggataacgccttaaatggcgaagaaacggtctaaataggctgattcaaggcatttacgggagaaaaaatcggctcaaacatgaagaaatgaaatgactgagtcagccgagaagaatttccccgcttattcgcaccttccttaggcagccaaccggtgggaataaataacgcagtaataaaaccccaggcaataaaagcaccaatattggggatgaccattgcagtcaaaaagcccccaaaagcctggacctttgcacgagcagacttgttttccataatattatcctgtagaggagagagtaattatccgcggctgataatgtccgctaattgtttttctgatgatgctgttaagagttgttcgagtatttcttcttcgcacagtaattcacttaacgcctgaatagcgccaatgtgcgaatcggcatcggcagcagagagtccgatgagtaatttaattggttcgtcattccccggaaaataaacaccttgttcaagtaatgtcaaagacatcccggttttaagcgccccacattccggtcgcgcatgaggcattgccacgcctggtgcgagaatataataagggccattgttaatggtggaatctttaattgcctgaatgtaattctcgctgatatagtttttatccagcaatgataccatcgagaaatcgatagcttcctgccaatcttttgctgaatgtataactgagattgatgattctggaaaataatcactaagccgcataaattatccttattttatttttagggtaccgtccggcggtaaaaataaaatactcgtgcggtttaatgaaagcaattgagcagggaaaccggtgttttgaaaacagtgaattattaatttcttatataacattgagttatagatataacaacaaatgtcaatacgcatatcgtgatgcatattacataattgatatttattgcatataaatatttgtgatctacaacacgccttatctattgcttgtccgcaaacggacatatcaaggtaataaaaaaggtcgccgaagcgacctttttacccgaaatgctaattacagcagttcttttgctttcgcaacaacgttatcaacagtgaagccgaactcttcaaacagcagctctgccggagcagattcaccgaaggtggtcataccgacgatagcaccgttcaggccaacatacttgtaccagtagtcagcaatacccgcttctacagcaacgcgtgcagtaaccgctttcggcagtacggattcacggtaagcagcatcctgcttgtcaaatgcgtcggtagacggcatggacaccacgcgcgctttcacgccttcggcagtcagtttttcgtaggcagcaacagccagttcaacttctgaaccggtagcgatgaaaatcagttccggctgaccggcgcagtctttcagcacataaccaccgcgcgcgatgtttgccagttgctcttcagttcgttcctgctgcgccaggttctgacgggagaggatcagtgcggtcgggccgtcctgacgctcaacaccgtatttccacgcgaccgcggattcaacctggtcacacggacgccatgtagacatgttcggggttacgcgcagagaagcgacctgctcaaccggctggtgagtcgggccgtcttcgcccagaccgatggagtcgtgggtgtaaaccatcacctgacgctgtttcatcagcgcagccatacgtacggcgttacgtgcgtattccacgaacatcaggaaggtggaggtgtacggcaggaagccaccgtgcagggagataccgttagcaatcgcggtcataccgaactcgcgaacaccgtagtggatgtagttacccgcagcatcttcgttgattgctttagaaccagaccacagggtcaggttagacggcgccaggtcagcagaaccgccgaggaattccggcaacagcggaccgaacgcttcgatagcattctgagacgctttacggctggcgattttcgccggattagcctgcagtttagcgatgaactctttcgctttagcgtcgaagtcagacggcatttcgcctttcatacggcgggtaaattcagcggcttcctgcggataagctttcgcgtaagcagcgaatttctcgttccatgcggattctttcgcctggcctgcttctttcgcatcccactgagcatagatttcagacgggatttcgaacggcgcatatttccagcccagttgttcgcgggtcagggcaatttcagcgtcgcccagcggcgcaccgtgggagtcgtgggtaccggctttgttcggggaaccgaaaccgatgatggttttgcacatcagcagggaaggtttgtcagtcactgcgcgcgcttcttctactgcgcgtttgatagatgccgcgtcatgaccgtcgatgtcgcgaataacgtgccagccgtaagcttcgaaacgcattgcggtgtcgtcggtgaaccagccttcaacgtgaccatcgatagaaataccgttgtcatcgtagaatgcaatcagtttacccagcttcagcgtacccgccagagagcaaacttcgtgggagatgccttccatcatgcagccgtcgcccatgaaggcgtaggtgtagtggtcgacaatgtcgtggcccggacggttaaactgcgccgccagcgttttttctgcaatcgccataccgactgcgttggcaataccctgacccagcggaccggtggtggtttccacaccagcggtgtaacccacttccgggtgacccggagttttagagtgcagctgacggaagtttttcagttcttccatcggcagatcgtaaccggtgaggtgcagcaggctgtagatcagcatggagccgtggccgttggacagcacgaagcggtcacggtcagcccaggacggattctgcgggttgtgtttcaggaaatcacgccacaggacttcggcaatgtcagccatacccataggggcacccgggtgaccggatttggctttctgtactgcgtccatgctcagcgcacgaatagcattggcaagctctttacgtgaggacattttgactccagatcggatgatgaagggcacgcccttaacgacttgacgacagcgcgttttgggctacgccggaaaatttgccaacaatttaccgcaagccgcgcgtcatgtacatggaacatccttttgccgcttcagaaatctctggatcatgctcgcatgttgcgcaatctactcgcccgtccgctgcgcttttccttatactgagactgagcgtcgattcacctgcaaacggcgcatttttagaataatcctgaccttgtgcggaagagaaaacatgaaaattcgcgccttattggtagcaatgagcgtggcaacggtactgactggttgccagaatatggactccaacggactgctctcatcaggagcggaagcttttcaggcttacagtttgagtgatgcgcaggtgaaaaccctgagcgatcaggcatgtcaggagatggacagcaaggcgacgattgcgccagccaatagcgaatacgctaaacgtctgacaactattgccaatgcgctaggcaacaatatcaacggtcagccggtaaattacaaagtgtatatggcgaaggatgtgaacgcctttgcaatggctaacggctgtatccgcgtctatagcgggctgatggatatgatgacggataacgaagtcgaagcggtgatcggtcacgaaatggggcacgtggcgttaggccatgtgaaaaaaggaatgcaggtggcacttggtacaaatgccgtgcgagtagctgcggcctctgcgggcgggattgtcggaagtttatctcaatcacaacttggtaatctgggcgagaaattagtcaattcgcaattctcccagcgccaggaagcagaagccgatgattattcttacgatcttctgcgccaacgcggcatcagcccggcaggtcttgccaccagctttgaaaaactggcaaaactggaagaaggtcgccaaagctcaatgtttgacgaccatcctgcatccgccgaacgcgcccagcatattcgcgatcgcatgagcgcggatgggattaagtaaagcctggtggtgtcgaacgtaggtcagataaggcgttcacgccgcatctgacatgaatggcacatttgttaccttgtgcgcattgccggatgcgatgctggcgcatcttatccggcctacgggtgccgaacgtaggtcggataaggcgttcacgccgcatccgacattaatggcacgttttacccgtgcgcatcgcatctggtgcttactcgccctttttcgccgcctgaatatacagcatttccagcgccagcgttgccgctgccagagcagtgatttccgactgatcgtatgccggagccacttccactacgtccatcccaacaatgttgagatctttcaggccgcgtaccagtttaatagcgcgatcggaggtcaggccgccaatcactggcgtaccggtgcctggtgcaaaagcaggatccaggcagtcgatatcaaaagtcaggtaaaccggcatatcacccacaatctgtttcacttgggcgataacgtcatccacgctgcgatcgttcacctggcaggcgtccagcacggtaaagccgttgtctttatcaaactcggtacgaataccaatctgcacggaatgattcgggtcgatcagaccttctttcggcgcggtatagaacatagtgccgtggtcaaattcacaaccgttcgcataggtatcggtgtgggcgtcaaagtgtaccagcgccattttgccgaaatgcttcgcatgagcacgcagcagcggcagcgtaacaaagtggtcaccaccgaaagagagcatacgcttaccggcagccagcagcttctcggcgtgcgcctgcagcttttcgctcatctcacgggcatcgccaaaggcatataccagatcgccgcagtccacgacgttcagacgctcacgcatgtcgaaattccacgggaagcggttgtgttcccaggccagattcgtcgaaacctgacggatcgctgccggaccgtggcgaccacccgcacgaccagaagtggccatatcgaacggcacgccagtaatcacccagtctgcatcgctgtcatacggctggaagttcatcggcaggcgtaaaaaaccaaaggcattggaaaccagtgagttatcgtattgatgacctaaggtgctcatggatggactcctattacaaagtcgatataaaaaaacccttccgcgtcgttaggcccgacgaggaagggttggatttgtcacaataaattgtggcggattatcaccgctaaattaagcggattcaagtaacacaggacttactcatcttcaagataagtataaccgtacaaacctgcctcgaactcttcaaggaactgttgttgcagttcagcatcaagatcggttttcttcacttgatcgcggaactgggttaacagcgttttcggatcgagctgtacatattgcagcatgtccgccacggtatcgccttcgtcagacagttctacttctacgctaccgtcagggaagacgaacacgtcaaccgcttcggtatcaccgaacaggttgtgcatgttgccgaggatctcctgatatgcgccgaccataaagaaaccgagcatcggcggattctctggatcgtactccggcattggcattgtcgtggcaataccgtcaccatcaatatagtggtcgatagcaccgtcagagtcacaggtaatatccagcagcacagcgcgacgttccggcacttgatccagcccttccagcggcagaaccgggaacaactggtcgatcccccatgcgtccggcatcgactggaacagcgagaagttgacgtacattttgtccgccatacgttcctgcagctcgtcgataatcggacgatgagcacggttttgcggatccagctgcttttgcacttcatggcacatgctcaaataaagctgctcagcccatgcacgttcttgcaggctaaagatgccggaagagtagccgatatgaatgtcgtgcagatccatctgactgtcgtgtaaccattcacgcagagaacggcgagttcccggttcgtgcatctcctgccaggtttcccacatgctttgcagcgcgcgcggcgcatcttctgcaggcgcggtcggcaccgtgtattcgttacgttccacgccgatgatattagacaccagcacggtgtgatgcgcagtcaccgcacgacccgattcggtgattaccgtcggatgcggcagaccgttttcttcacacgcatcgccaatcgcccagataatgttgttggcgtattcattgaggccgtagttcaccgaacagtcggactgcgaacgagtaccttcataatccacgcccagaccgccgccgacgtcgaagcactgaatattgacgcccagcttgtgcagttccacatagaaacgcgcggattcacgaacgcctgtcgcgatatcgcgaatattcgccatctgcgaaccgaggtggaagtgcagtagttgcaggctgtcgagacgcccggcttcacgcagggtttcaaccagttgcagtacctgagtcgcagccaggccgaacttcgatttttccccgccggaggactgccatttacccgaaccctgcgaagccagacgtgcacgcacgcccagacgaggaacgacattcagacgttctgcttcatccagcacaatggcgatttctgacatcttctcaatgaccagatagaccttgtgccccatcttctcgccaattaatgccaggcggatatattcgcggtctttataaccgttgcagacgatgacgctacgggtcatgccagcatgtgccagtactgccatcaactcggctttggaaccggcttccagacccagcggttcgcccgaatgaatcagggactcaatcacgcggcggtgctggttaactttgatcggataaacaaggaagtaatcgccgttatagccgtaggattccctcgcacgtttgaacgcggcgttaatggaacgcaaacggtgctgcaggatctgtgggaaacagaacagtgcaggcagacgctggccctgtgcttcacgagttttcactaactgcgcgagatcgacgcgagcttccgggacgtccgggtccgggcacacgctaatgtggcccagctcgttaacgtcatagtagttattgccccaccaggcaatattgtaagtacgcagcatcttgctggcttcctgggagctcattgcaacctcctgcatggagcgtagtacaccgtgttcgcccgctgacgaaggcaaacccatagacatgtcgtcagacatagcgaacctcaaattattttattaagtgtaaaacagttaacgactatcgcagcctggaactgcgataacaacccataagcacatggattttccagcagtgaatgctgacgctccaactgcgcaaccggtttctttttcataacattattaagcacataaccgaacgtaagtgtgaaagttcggcgaaaccacgagaaaactcttgtttttacaagagcgcccttgttcagtcctcagtaactgtaaccagctcttgaatcctgagaagcgccgagatgggtataacatcggcaggtatgcaaagcagagatgcagagtgcggggaacgaatcttcaccagaacggtgagacaggttaagcagcagacaacggttcattatttcgtatcacctccacggccgcctgttaagacgaacccacaagccaaaactctgatttcaacccggctggaagtggcaacacgaaagaaacgtcgtgtgctttttatttaagccgcgcgccgcgttttataccccacaatggcagaaaattgcaaaagataaatacgcagaatgccggcattgtcaggaaaaatttccagccacgtttttaacagaatgagacacgattcaaaaaaaagtggaaatagggtgaagaattgacctaaaatagccatccagatgttaatccatccataccgattaacactcagactgccagtgtttttaacctgcagagtcgtggtaggatccgctaccacagaaaatccacacaacagtttgagctaaccaaattctctttaggtgatattaaatatggcaaaacacctttttacgtccgagtccgtctctgaagggcatcctgacaaaattgctgaccaaatttctgatgccgttttagacgcgatcctcgaacaggatccgaaagcacgcgttgcttgcgaaacctacgtaaaaaccggcatggttttagttggcggcgaaatcaccaccagcgcctgggtagacatcgaagagatcacccgtaacaccgttcgcgaaattggctatgtgcattccgacatgggctttgacgctaactcctgtgcggttctgagcgctatcggcaaacagtctcctgacatcaaccagggcgttgaccgtgccgatccgctggaacagggcgcgggtgaccagggtctgatgtttggctacgcaactaatgaaaccgacgtgctgatgccagcacctatcacctatgcacaccgtctggtacagcgtcaggctgaagtgcgtaaaaacggcactctgccgtggctgcgcccggacgcgaaaagccaggtgacttttcagtatgacgacggcaaaatcgttggtatcgatgctgtcgtgctttccactcagcactctgaagagatcgaccagaaatcgctgcaagaagcggtaatggaagagatcatcaagccaattctgcccgctgaatggctgacttctgccaccaaattcttcatcaacccgaccggtcgtttcgttatcggtggcccaatgggtgactgcggtctgactggtcgtaaaattatcgttgatacctacggcggcatggcgcgtcacggtggcggtgcattctctggtaaagatccatcaaaagtggaccgttccgcagcctacgcagcacgttatgtcgcgaaaaacatcgttgctgctggcctggccgatcgttgtgaaattcaggtttcctacgcaatcggcgtggctgaaccgacctccatcatggtagaaactttcggtactgagaaagtgccttctgaacaactgaccctgctggtacgtgagttcttcgacctgcgcccatacggtctgattcagatgctggatctgctgcacccgatctacaaagaaaccgcagcatacggtcactttggtcgtgaacatttcccgtgggaaaaaaccgacaaagcgcagctgctgcgcgatgctgccggtctgaagtaatctttcttcacctgcgttcaaaggccagcctcgcgctggcctttttcttttggataggcgttcacgccgcatccggcaaaaaaaccgcccgcacaataacatcattcttcctgatcacgtttcaccgcagattatcatcacaactgaaaccgattacaccaaccacaacagacaaagatttgtaatattttcatattattattcggttttcacagttgttacatttcttttcagtaaagtcttaattgcagataacagcgtttaatctatgatgatataactcaattattttcatgcacttaaatcataactaagataaatgttagtgtaagcgattacactgatgtgatttgcttcacatctttttacgtcgtactcacctatcttaattcacaataaaaaataaccatattggagggcatcatgcctgacgctaaaaaacaggggcggtcaaacaaggcaatgacgtttttcgtctgcttccttgccgctctggcgggattactctttggcctggatatcggtgtaattgctggcgcactgccgtttattgcagatgaattccagattacttcgcacacgcaagaatgggtcgtaagctccatgatgttcggtgcggcagtcggtgcggtgggcagcggctggctctcctttaaactcgggcgcaaaaagagcctgatgatcggcgcaattttgtttgttgccggttcgctgttctctgcggctgcgccaaacgttgaagtactgattctttcccgcgttctactggggctggcggtgggtgtggcctcttataccgcaccgctgtacctctctgaaattgcgccggaaaaaattcgtggcagtatgatctcgatgtatcagttgatgatcactatcgggatcctcggtgcttatctttctgataccgccttcagctacaccggtgcatggcgctggatgctgggtgtgattatcatcccggcaattttgctgctgattggtgtcttcttcctgccagacagcccacgttggtttgccgccaaacgccgttttgttgatgccgaacgcgtgctgctacgcctgcgtgacaccagcgcggaagcgaaacgcgaactggatgaaatccgtgaaagtttgcaggttaaacagagtggctgggcgctgtttaaagagaacagcaacttccgccgcgcggtgttccttggcgtactgttgcaggtaatgcagcaattcaccgggatgaacgtcatcatgtattacgcgccgaaaatcttcgaactggcgggttataccaacactaccgagcaaatgtgggggaccgtgattgtcggcctgaccaacgtacttgccacctttatcgcaatcggccttgttgaccgctggggacgtaaaccaacgctaacgctgggcttcctggcgatggctgctggcatgggcgtactcggtacaatgatgcatatcggtattcactctccgtcggcgcagtatttcgccatcgccatgctgctgatgtttattgtcggttttgccatgagtgccggtccgctgatttgggtactgtgctccgaaattcagccgctgaaaggccgcgattttggcatcacctgctccactgccaccaactggattgccaacatgatcgttggcgcaacgttcctgaccatgctcaacacgctgggtaacgccaacaccttctgggtgtatgcggctctgaacgtactgtttatcctgctgacattgtggctggtaccggaaaccaaacacgtttcgctggaacatattgaacgtaatctgatgaaaggtcgtaaactgcgcgaaataggcgctcacgattaatctccccaagcttcctcccatcgcggaggaagccacctcttgcagtcatcttttcttcgctctatcctctgccgctatgaaaacatcccgtctccctatcgccatccaacaggccgttatgcgtcgcctgcgggaaaaactcgcccaggccaacctgaagctagggcgtaactacccggagccaaaactctcttacacccagcgcggaacctccgccggaacggcctggctggaaagctatgaaattcgcctcaatcccgttttgctgttggaaaacagtgaagcttttattgaagaagtggtaccgcacgaactggcacatttgctggtatggaaacatttcggccgcgtagcgccacatggcaaagagtggaagtggatgatggaaaacgtgctgggtgttcccgcccgtcgtacgcatcagttcgaactgcaatccgtgcgtcgcaacaccttcccctaccgctgcaagtgccaggagcatcagcttaccgtacgccgccataatcgcgtagttcgtggcgaggccgtctatcgctgtgttcactgcggtgaacagctggttgcgaaataaccatctgaactatcaggaactttcctgatctggctgattgcataccaaaacagctttcgctacgttgctggctcgttttaacacggagtaagtgatgtaccgttatttgtctattgctgcggtggtactgagcgcagcattttccggcccggcgttggccgaaggtatcaatagtttttctcaggcgaaagccgcggcggtaaaagtccacgctgacgcgcccggtacgttttattgcggatgtaaaattaactggcagggcaaaaaaggcgttgttgatctgcaatcgtgcggctatcaggtgcgcaaaaatgaaaaccgcgccagccgcgtagagtgggaacatgtcgttcccgcctggcagttcggtcaccagcgccagtgctggcaggacggtggacgtaaaaactgcgctaaagatccggtctatcgcaagatggaaagcgatatgcataacctgcagccgtcagtcggtgaggtgaatggcgatcgcggcaactttatgtacagccagtggaatggcggtgaaggccagtacggtcaatgcgccatgaaggtcgatttcaaagaaaaagctgccgaaccaccagcgcgtgcacgcggtgccattgcgcgcacctacttctatatgcgcgaccaatacaacctgacactctctcgccagcaaacgcagctgttcaacgcatggaacaagatgtatccggttaccgactggaagtgcgagcgcgatgaacgcatcgcgaaggtgcagggcaatcataacccgtatgtgcaacgcgcttgccaggcgcgaaagagctaacctacactagcgggattctttttgttaacccctaccccacgcgtacaaccgcgtggggagacgacgcggatttttaactatgcgtatcccccgcatttatcatcctgaaccactgaccagccattctcacatcgcgctttgcgaagatgccgccaaccatatcgggcgcgtactgcgcatggggccggggcaggcgttgcaattgtttgacggtagcaaccaggtctttgacgccgaaattaccagcgccagcaaaaaaagcgtggaagtgaaggtgctggaaggccagatcgacgatcgcgaatctccgctgcatattcacctcggtcaggtgatgtcgcgtggtgaaaaaatggaatttactatccagaaatcgatcgaactcggtgtaagcctcattacgccacttttttctgagcgctgcggcgttaaactggatagtgaacgtctgaacaagaagcttcagcagtggcagaagattgcaattgctgcctgtgagcagtgtggtcgtaaccgggtgccggaaatccgtccagcgatggatctggaagcctggtgtgcagagcaggatgaaggactgaaactgaatcttcacccgcgcgccagtaacagcatcaatacgttgccgttaccggttgaacgcgtccgcctgctgattggcccggaaggcggtttatcggcagatgaaattgccatgactgcccgctatcaatttactgatatcctgttgggacctcgcgttttgcgtacagagacaactgcgctcaccgccattaccgcgctacaagtacgatttggcgatttgggctaacggagaagaataatgatcaagctcggcatcgtgatggaccccatcgcaaacatcaacatcaagaaagattccagttttgctatgttgctggaagcacagcgtcgtggttacgaacttcactatatggagatgggcgatctgtatctgatcaatggtgaagcccgcgcccatacccgcacgctgaacgtgaagcagaactacgaagagtggttttcgttcgtcggtgaacaggatctgccgctggccgatctcgatgtgatcctgatgcgtaaagacccgccgtttgataccgagtttatctacgcgacctatattctggaacgtgccgaagagaaagggacgctgatcgttaacaagccgcagagcctgcgcgactgtaacgagaaactgtttaccgcctggttctctgacttaacgccagaaacgctggttacgcgcaataaagcgcagctaaaagcgttctgggagaaacacagcgacatcattcttaagccgctggacggtatgggcggcgcgtcgattttccgcgtgaaagaaggcgatccaaacctcggcgtgattgccgaaaccctgactgagcatggcactcgctactgcatggcgcaaaattacctgccagccattaaagatggcgacaaacgcgtgctggtggtggatggcgagccggtaccgtactgcctggcgcgtattccgcaggggggcgaaacccgtggcaatctggctgccggtggtcgcggtgaacctcgtccgctgacggaaagtgactggaaaatcgcccgtcagatcgggccgacgctgaaagaaaaagggctgatttttgttggtctggatatcatcggcgaccgtctgactgaaattaacgtcaccagcccaacctgtattcgtgagattgaagcagagtttccggtgtcgatcaccggaatgttaatggatgccatcgaagcacgtttacagcagcagtaacccaccttagcgagaaggatctcgttgagactctgagtgacagcgcccttctttccacgcatactgggcgctgttgcttttttgaaccaggaaacagaacctctgacaatgaatttacagcatcactttcttattgccatgcctgctctccaggatccgattttccgtcgttccgtggtctacatttgcgaacataataccaatggtgcaatggggatcatcgtcaacaagccgctggaaaatctcaaaattgaagggattctggaaaagctgaagatcacgccggagccgcgtgatgaatcaatccgtctggataaaccggttatgctcggcggtccgctggctgaagatcgcgggtttattttgcatactccgccctccaattttgcttccagcattcgcatttcagacaacacggtaatgaccacttcccgcgatgtgctggaaacgctcggcaccgataaacaaccgtctgacgtattggtggctctgggttatgcctcctgggagaaaggtcaactggaacaagaaattctcgataacgcgtggctaacggccccggcagatctgaatattctgttcaaaacgccgattgccgaccgctggcgcgaggcggcaaaactgattggtgtggatattctcaccatgcctggtgtggcaggacacgcctgatgagtggaaccttactcgccttcgacttcggcaccaaaagcattggcgtagcggtcggccaacgcattaccggcaccgctcgccctttgcctgcaattaaagcacaggacggtacgccggactggaacattatcgagcgtttactgaaagagtggcagccggacgaaatcatcgtcggtttgccgctgaatatggacggcaccgagcaaccattgactgccagagcgcgtaaatttgccaaccgtattcatggccgtttcggtgttgaagtaaagctccatgacgagcgtcttagcactgtggaagcccgttccggtctgtttgaacagggcggctatcgggcgctcaacaaaggcaaagttgactctgcctctgcggttattattctcgaaagctatttcgagcagggatattaaggcgatttaaacgcctggcggagtgtaaataatatcatcgcgtcttattgccggatgcggcgtgaacaccttatccagcacacatctggcagcggctataggtctgataagacgcgttagcgtcgcatcagacatttattgcctttgtaggcccgataagcttgcgcatcgggcatggcaacgtcacaaacgcccttcccccacccggtgctgataactctgctgaaacgttatcatccccacctgctgcccggtttgaataacatgcggtaactggtgggttttcccttcgcgaatcaaattccccaccgcgggtgtgttaatcagcaattcaaatagcgccacgcgtccttcctgtttatccacttccagcttttgtgacagcactgcccgtaaactacctgccagttgattacgcacggggtctttttcctgcgccggaaatgaatccaccagtcgctcaactgcctgcgcggcaccacgcgtatgtaatgttgccagcaccaaatgcccggtttctgccgccgtcagtgccagacggattgtctcgctgtcacgcagctctccgagcaaaatcacatcaggatcttcccgcaatgcggcccgcaatcccgatgcgaacgtcatacagtgcaaaccaatttcccgctgctggatcaaacatcgctggctggcatagagatattcaacaggatcttccagcgtcagaatatgcgcatcggcatgttgattgagatagccaaccatcgccgccagcgtggtagatttgccactccccgtcgcccccgtcaccagaatcaggccattctcgctcttgagtaattccggcaataccgttggtgcgccaagctgttcgagctgcgggcagtgcgaaggtaacagccgtaacgccagcgaaatgccatgccgttgcgcgaatgcgctgccacgcaatcgctggttttccgccagcgacacggcaaaatccagctgaccattctccagcaatattgcccgctgatcgtcatccagccactcccgcagtagctcttcgacgtccggcgtatcaaacggcgcagcttccattctgccgcgaatgcgccatcgtgcgggccaggcgctgcacaggtgtagatccgagacgttatgctttacactaagggccacaatttcttccatattcatactaagatcctcggaaaatgaacgatattgcgcataacctggcacaggtccgggacaaaatctcagcggctgcaacgcgttgcggccgttctccagaagaaattacgctgcttgcagtcagtaaaacaaaacctgcgagcgccatcgcagaagccattgatgccgggcagcgtcaatttggtgaaaactacgttcaggaaggggtagataaaattcgccactttcaggaactgggcgtaacaggattagaatggcattttattggcccgttgcagtctaataaaagccgcctggtggcagagcatttcgactggtgtcataccatcgaccgtttgcgcatcgctacccgtctcaacgaccagcgcccggcagaacttccccctcttaacgttctgattcaaattaacattagtgatgaaaacagtaagtccgggattcaactggctgaactggacgagctggcagctgcggtcgctgaactaccgcgtttacgtctgcgcgggttgatggcaatccctgcgcctgagtcagaatatgtaaggcagtttgaagttgcacgccaaatggctgtagcatttgccggactgaaaacgcgctacccgcatatcgacacgctctctctgggaatgtcggacgatatggaagccgccattgcggcaggtagcacgatggttcgtatcggcactgcaatttttggtgcgcgtgattactctaaaaaataaggaattaaaggaacgccatgaatacgttgactttcctgctttcaacggtcattgagctgtataccatggtgctgttattacgcatctggatgcagtgggctcattgtgatttttacaaccccttctcacagtttgtagtgaaggtaacgcagccaattatcgggccactgcgccgcgttattccggcaatggggccaattgacagcgcctcgctgctggttgcctatattctcagttttatcaaagccatcgtgctgtttaaagtggtgaccttcctgccaatcatctggattgccggtttactgattctgctgaaaaccatcggcctgctgattttctgggtcctgctggtgatggcgattatgagctgggtaagccaggggcgtagcccgattgaatacgtgctgattcagctggccgatccgctgctgcgcccgattcgccgcctgctaccggcaatgggtgggattgatttctcgccgatgatcctcgttctgctgctgtatgtcatcaatatgggtgtcgcagaagtattacaggcaaccggaaatatgctgctgccagggctgtggatggcgttatgaatgccgtaacagttaatgatgacggtctggttttacggctctatattcagccgaaagccagccgtgattctattgtcggtttacatggcgacgaagttaaagtcgccattaccgcgccgccggttgacggccaggccaacagtcatctggtgaagtttctcggtaagcaattccgggttgccaaaagccaggtggtgattgaaaaaggcgaacttggccgccacaaacaaattaaaatcattaatccgcaacaaatcccgccagaaatcgcggcgttaattaattaggtatcctatgcaaaaagttgtcctcgcaaccggcaatgtcggtaaagtgcgtgagctggcgtcgctgcttagcgacttcggtcttgatatcgtggcccaaacagacctcggcgttgattccgctgaagaaaccggcctgacctttatcgaaaacgcgattctgaaagcgcgccatgcggcaaaagtgaccgctttaccggcaattgccgacgactctggtctggcggtagatgtgcttggcggcgcgccgggcatttactccgcgcgttattccggtgaagacgcgaccgatcaaaagaatctgcaaaaactgctggaaacaatgaaagacgtaccggacgaccaacgtcaggcgcgtttccactgcgtgctggtatatctgcgtcacgcggaagatcccactccgctggtatgccacggtagctggccgggcgtgattactcgtgaaccagcgggcactggtggctttggttatgatccaatcttcttcgtaccttccgaagggaaaaccgccgccgaactgacccgcgaagaaaagagcgccatttcccaccgtggtcaggcgttgaaactgctgctggacgctttacgtaatggttaaattacctccgctgagtctctacattcacatcccgtggtgcgtgcagaaatgcccgtactgcgatttcaactctcacgcgttgaaaggagaagtgccgcacgacgattatgttcagcatctgcttaacgatctggacaacgatgtggcttacgctcagggccgtgaagtaaagacaatctttattggcggtggtacgccgagcctgctttccggcccggcgatgcaaacgctgctggacggcgtgcgtgcgcgtttgccgctggcagcggatgcagaaattactatggaagcgaaccctggcacggtagaagccgatcgctttgtcgattatcagcgtgctggtgtgaaccgcatctctattggtgtgcagagttttagcgaagaaaagctgaaacgacttgggcgtattcatggcccgcaagaagcgaaacgcgcggcgaagctggcgagcggtttagggttacgtagctttaaccttgatttgatgcatgggctgccggatcaatcactggaagaggcgcttggcgatctacgccaggccattgaactgaatccgccgcatctttcctggtatcaactgaccatcgaacccaatacgctgtttggttcgcgaccaccggtgctgccggacgatgacgcgttgtgggatatattcgaacaggggcatcagttattaaccgcagcgggttatcagcaatatgaaacttccgcttacgccaaacccggttatcagtgccagcacaatctcaactactggcgctttggtgactacatcggtattggctgcggcgcacacggcaaagtgaccttcccggatgggcgcattctgcgtaccaccaaaacgcgtcatccgcgtggttttatgcaaggaaggtatctggaaagccagcgtgatgtcgaagccacagataagccgtttgagttctttatgaatcgcttccgtctgctggaggccgcgccgcgcgtggagtttattgcgtataccgggctttgcgaagatgtgattcgcccacagttagacgaggcgattgcccagggttatctcaccgaatgtgcggattactggcagataacggaacatgggaagctgtttttaaattcgctgctggagctttttctggctgagtaaacttgtattgccggatgcggcgtgaacgccttatccagccgacatgtggcagcggttgtaggtctgataagacgcgcaagcgtcgcatcagacgttgattgccggatgcggggtcaacgccgcatcctgctacaaatcgtgcactatatcaaacttacttaatcaccccattgcgccgcagttgttcggtatcttttttccagcgttcattagcttggttgatatcgtcaattttcatcaaaatcgcgacttttttactgtttatttctgaaactttcatcgttaacggatattgccctttttcgagcgttacccagtcatcctgcaatttacggctaagtttttgtgattgcagaaaagtctgtcgccgttgttcgttgatatcgaaatctcgtttctgctgaatcggcacttcataacactcttcactctgtttatgacatgccgcaatcgccggttgataaacctctttgtcatatttaaccgcgaacgcctcgctatcgttctgtttattaaactcatcacgctgttggtgaatttttttaaaggcgtcttcgcgggtcatttgcttaccgtttgcatcttttccccaatatgcatccgctgctttctgcgccgccaccatttgcttatcaagcgctttcacttccttttccagcgcaggaatcgagttcttctgggtattcaacgcagattcaagctgactaaagcgataattgaaatcttcgctattcacgatcagatatttattattcgttttgatatcgtcgaccacccgcccacgatcgctggctgccgcctgaaaagagtaaaagttcaccgaccagccagacgcgggcgttcctttactggttaacatcgccgagaattttaccggtttatctttcgtccaggtctgttcgagcagttcgtaatctgccaactgaccgacccaggtatagagatcgtcactggaagagacatcgccttccgctgaccaggtggcctgattacccttagcatcaagattttttaaggtgatagcatcaagcttgagaatgccgtgatactgctttttgaattgatcttttaagatattttcagttggcggttcgccatctgcccaggcattaccagtcatcaacataagcagtgccgtgccaacaatccattgctttttcacccgaaaaacctcacgcggaataatttattccggtgattatcattagggtaattaaaattggcaatggacgtgagtctgaagtgaaaaagccccggcacgataccggggcgaggcgattagtactgattgaagatctgctggatctgctgcggatctttggtttgcgtcagagccagttgcagcagaacgcgcgctttttgcgggttcagcgtgccagaggcgacgaagccgtatttcgcatcatccacttcggcatcctgagtggtagcgcccgtcggtacgcgggaagaacgcacgactgcagtaccggttttcgcggcggtcgccagcgtgtcgaacacagatttatacaggttgccgttacccacaccagcgctaacgatgccatcatagcccgcatctaccagtgctttagccggaagatcggatgcgttagcgtagttataaacaatgccgactttcggcagttcattcagcttagagacatcgaatggcgtgtcgctggtatgcttacgtgccggggtacgctggtagtcaatcttaccgttgtgaatgtaacccagaggaccgtagttaacagacttgaaggtcgctacgtcggtggtgttggttttggtgacgtcacggccatcaagcacggtgtcattcatcactaccagcacgccacggttggcggaggctttatcagctgcggtcactaccgcgttatacaggttgaatggaccgtctgcgctcatagacgtggacggacgcattgcgccgaccatcaccaccggtttgtcgcatttcaccgtcaggtcgaggaagtaagcagtttcttccatcgtgtcggtaccgtgggtaatgacgaagccgtcggtcttatcgcagtcggtgttaatttttttcgccagtgtcagccagacattatcgttcatgtcctgggagccgatattcactacctgctcgcctttaacgttcgcaatgtcttttagttgcggcaccgcattaaccagattttctacgccaactttacccactgtgtagttagatttggttgcggagtcaccaccaccggcaatggtcccgccggttgctaaaatggtgatattgggtaatgccaatgctgcaccactaaaacccataaccagtgcggcaagtgccgtctttttgaaaaactccatttcattcctccagttacgtgaacgctacgcattatcccttagctctgtatgggaaatttgacgttaaacaatttacaacgtgaatatattttggagatctacaaagttagaggcaggtaacaaaacgaagaattaaacggcataaaaaagtattatgccgtcttaaaatagaggattattttaaattcccgaccagggctttgcggctatcttccagagtcacaacgcggctacaaacatctttgccaaactgctggaaatctttttcctgctttttccactcggtttggattgaggattgcagcccccccaggcttcccagcacattctgtaatgggttaccgccgcttttcagcaccgctttcgcgcccatttcattaatgctgtcctgtaaaattccacccattgcctgattcactaattgctggccttcggcgcgaacctgatcaatggctttatagtgaaacgtcaggccatcgctgcgcgtttcaataatgcggttcatctgctctttcagctgcgcatcaagtttggtcagacggctgcgcattttgctgctttcgcccatctcctgaacgataattttatccagagcaatacgggctttctcgacgcggcttttcgcgccttcatcaatccacggcagcgtgctgcgtagttcagcctgataatccttcgcctgctcgcgctgggcggcattcagggaatattgcttaccgttatacatcacgttgccgtctggcgtgatcaccagattgccgttttcgcccttcacctgcacggtttgcgggctgacaatcacatcgtcacgcggcgtgacgctgcactggtagtcggcgtgagcggtcattgccgtcactgaaagtgctgccgccagcagcattttgcgcatcatagtcttccctcaagaaaaaatcaggccagcatttgctggccccagattgataacaaagtacgcgttttccatgccggatgcggcgtaaacaccttatcccgcctactcgatcgtgcatctttccaggcctgataagcgtagcgcatcaggcagttttgcatttgtcatcgcccgtatgctttcttagtcccaccaaacgtcgaaaagttcgctggtgcgtacctcatccagtttgcgctcttccagccacttacgcacaatcgcctgatgttcttcggtgcatttgccgatttcctgcatgcagatcagaccttcccaggccagataaccgctgccgtcaaaggccagtttgttcggttcgataacctcgttaataaaatcatcaacggttttatcaatctgttcttccgatgtaccttccgggaatcgccatgccaccgaaaatcctaattcctggaattcgtcgatgtgcatttttttacgcagacgacggctacggttctttgccattatttcaccctctcgaacattaagtcccatactccgtgaccaagacgatgaccacgttgttcaaatttcgtcaccggacgtgatgccggacgcggtacgtaatcattgctctctgacaggtttttataaccgtcaatagaagacatcacttcaagcatatgttccgcataaggttcccagtcggtcgccatatggaatacgccccccagctgcagtttgctttttaccagttcggcaaacggcacctgaacgatacggcgtttattatggcgcgctttgtgccacgggtcagggaaaaagagctgcaccatgcgcaatgaattgtcaggaatcattttatgcagcacttcaaccgcatcgtgacacatcacgcgcaggttgcttaaaccttcttcatgcgcagaagccaggcacgcaccaacgcccggtgaatgcacttcaatgccgaggaagtcctgctcagggcgatctttagccattgccaccagcgacgcccccatgccaaaaccaatctcaagcgtcaccggcgcttcacggccaaaaagcgcggggaaatccagcatatcttcgctgaactcaacgcccatcaccggccagtagttttccagcgcatgttcctggcctttggtcagtcgcccctggcggcgcacaaaactacggatacggcgcagtgggcggccgttttcatcaaattccggtgaaatgacgtcgtttttcataaaggtttagtcgcttgtgaaagtgttctgaaaacgggcattatccaaagttagttgccggatgcaagcatgataaggccgtggctgcggaaagttccggtttacaccctgccgtcgctgtgctgcaatcttgcccccaacaacagtgaattcggtgaccatgcaagcgtcgcaattttcagcccaggttctggactggtacgataaatacgggcgaaaaactctgccctggcaaattgacaagacgccctacaaagtatggctctcagaagtgatgttgcaacaaactcaggttgcgaccgttatcccctattttgaacgctttatggcgcgcttcccgacggtgaccgatctcgccaatgcgccgctcgacgaagttctccacttgtggaccgggcttggctattacgcccgcgcgcgcaatctgcataaagcggcacaacaagtggcgaccttacacggcggtaaattcccggaaacctttgaggaagttgcagcactgccgggcgtcgggcgttccaccgcaggcgcgattctctcgctttctctgggtaagcactttccgattctcgacggtaacgtcaaacgcgtgctggcgcgctgctatgctgtaagcggctggcctgggaaaaaagaggtcgagaataaattatggagtttgagcgagcaggtgacgcccgcggttggcgtggaacggtttaatcaggcgatgatggatttgggtgcgatgatttgtacgcgctcgaaaccgaaatgttcgctctgtccgctacaaaacggatgtattgccgccgccaacaatagctgggcgctttatccgggcaaaaaaccgaaacagacgctgccggagcgcaccggctactttttgctattacagcacgaagatgaagtattgctggcgcagcgtccgccgagcggattgtggggcggtttatactgtttcccgcagtttgccgacgaagaaagtttgcggcagtggctggcgcaacggcagattgctgccgataacctgacgcaactgaccgcgtttcggcataccttcagccatttccacttagatattgtgcctatgtggcttcccgtgtcgtcattcaccggctgcatggatgaaggcaatgcgctctggtataacttagcgcaaccgccgtcagttggcctagcggctcccgtggagcgtttgttacagcagttacgcactggcgcgccggtttagcgcgtgagtcgataaagaggatgatttatgagcagaacgattttttgtactttcctgcaacgtgaagcagaaggtcaggattttcagctgtaccccggcgagctgggaaaacgcatctataacgagatctccaaagaagcctgggcgcagtggcagcacaagcaaaccatgctgattaatgaaaagaaactcaacatgatgaatgccgagcaccgcaagctgcttgagcaggagatggtcaacttcctgttcgagggtaaagaggtgcatatcgagggctatacgccggaagataaaaaataaaaacagtgccggagcacgcctccggcaacttgcataaaaacaaacacaacacgcacccggaatgatgaaaaaatatctcgcgctggctttgattgcgccgttgctcatctcctgttcgacgaccaaaaaaggcgatacctataacgaagcctgggtcaaagataccaacggttttgatattctgatggggcaatttgcccacaatattgagaacatctggggcttcaaagaggtggtgatcgctggtcctaaggactacgtgaaatacaccgatcaatatcagacccgcagccacatcaacttcgatgacggtacgattactatcgaaaccatcgccgggacagaacctgccgcgcatttgcgccgggcaattatcaaaacgttattgatgggtgacgatccgagttcggtcgatctctattccgacgttgatgatattacgatttcgaaagaacctttcctttacggtcaggtggtggacaacaccgggcagccgattcgctgggaaggtcgcgcaagcaacttcgcggattatctgctgaaaaaccgtctgaagagccgcagcaacgggctgcgtatcatctacagcgtcaccattaacatggtgccgaaccaccttgataaacgtgcgcacaaatatctcggcatggtccgccaggcgtcacggaaatatggcgttgatgagtcgctgattctggcaattatgcagaccgaatcttcctttaacccgtatgcggtcagccgttccgatgcgctgggattaatgcaggtggtacaacatactgccgggaaagatgtgttccgctcgcaggggaaatccggcacgccgagccgcagtttcttgtttgatcctgccagcaatattgataccggcaccgcgtatctggcgatgctgaacaatgtttatctcggcggaattgataacccaacatcgcggcgttatgccgtcatcaccgcctataacggcggcgcaggcagcgtgctgcgagtcttttcgaatgataagattcaggctgccaatattattaacaccatgacgccgggcgatgtttatcagacgctgacgacccgccatccctctgcggaatctcgccgttatctttataaagtgaataccgcgcaaaaatcctaccgccgccgataattccattaaccgcccctgacgatgctcaggggcaaaaatgttatccacatcacaatttcgttttgcaaattgggaatgtttgcaattatttgccacaggtaacaaaaaaccagtccgcgaagttgatagaatcccatcatctcgcacggtcaaatgtgctttttcaaacactcatccgcatcacgatgtgaggaaattaacatgaatcttaagctgcagctgaaaatcctctcttttctgcagttctgtctgtggggaagttggctgacgaccctcggctcctatatgtttgttaccctgaagtttgacggtgcttctattggcgcagtttatagctcactgggtatcgcagcggtctttatgcctgcgctgctggggattgtggccgacaaatggttaagtgcgaaatgggtatatgccatttgccacaccattggcgctatcacgctgttcatggcggcacaggtcacgacaccggaagcgatgttccttgtgatattgattaactcgtttgcttatatgccaacgcttgggttaatcaacaccatctcttactatcgcctgcaaaatgccgggatggatatcgttactgacttcccgccaatccgtatctggggcaccatcggctttatcatggcaatgtgggtggtgagcctgtctggcttcgaattaagccacatgcagctgtatattggcgcagcactttccgccattctggttctgtttaccctgactctgccgcatattccggttgctaaacagcaagcgaatcagagctggacaaccctgctgggcctcgatgcattcgcgctgtttaaaaacaagcgtatggcaatcttctttatcttctcaatgctgctgggcgctgatgaatcccctaatgattttggtaaaaatcattaagttaaggtggatacacatcttgtcatatgatcaaatggtttcgcgaaaaatcaataatcagacaacaagatgtgcgaactcgatattttacacgactctctttaccaattctgccccgaattacacttaaaacgactcaacagcttaacgttggcttgccacgcattacttgactgtaaaactctcactcttaccgaacttggccgtaacctgccaaccaaagcgagaacaaaacataacatcaaacgaatcgaccgattgttaggtaatcgtcacctccacaaagagcgactcgctgtataccgttggcatgctagctttatctgttcgggcaatacgatgcccattgtacttgttgactggtctgatattcgtgagcaaaaacgacttatggtattgcgagcttcagtcgcactacacggtcgttctgttactctttatgagaaagcgttcccgctttcagagcaatgttcaaagaaagctcatgaccaatttctagccgaccttgcgagcattctaccgagtaacaccacaccgctcattgtcagtgatgctggctttaaagtgccatggtataaatccgttgagaagctgggttggtactggttaagtcgagtaagaggaaaagtacaatatgcagacctaggagcggaaaactggaaacctatcagcaacttacatgatatgtcatctagtcactcaaagactttaggctataagaggctgactaaaagcaatccaatctcatgccaaattctattgtataaatctcgctctaaaggccgaaaaaatcagcgctcgacacggactcattgtcaccacccgtcacctaaaatctactcagcgtcggcaaaggagccatgggttctagcaactaacttacctgttgaaattcgaacacccaaacaacttgttaatatctattcgaagcgaatgcagattgaagaaaccttccgagacttgaaaagtcctgcctacggactaggcctacgccatagccgaacgagcagctcagagcgttttgatatcatgctgctaatcgccctgatgcttcaactaacatgttggcttgcgggcgttcatgctcagaaacaaggttgggacaagcacttccaggctaacacagtcagaaatcgaaacgtactctcaacagttcgcttaggcatggaagttttgcggcattctggctacacaataacaagggaagacttactcgtggctgcaaccctactagctcaaaatttattcacacatggttacgctttggggaaattatgaggggatctctcagcgttacgcgcgataccgccacctttaacctgccgtttatttcgctggggcaagtcggtgagggcaaactgatggttatcggtaacccacactacaacagcattttgcgttgcccgaacggttacagctggaacgggggcgttaataaagatgggcagtgtacgctcaacagcgacccggatgacatgaagaacttcatggagaacgtgctgcgctatctgtccgacgataaatggaagccggacgcgaaagccagcatgaccgtaggcaccaacctggatactgtctattttaaacgtcatggtcaggttacaggaaacagcgctgcgttcgacttccatccggattttgcgggcatctctgttgagcatttaagtagctatggcgatctcgatccgcaggaaatgccgctgctgatccttaacggctttgaatatgtgactcaggtgggtaacgatccttatgcaatcccgctgcgtgcagataccagcaaaccgaagctgactcagcaggatgtgaccgatctgatcgcctatctgaacaaaggtggatcggtgctgatcatggaaaacgtgatgagcaatcttaaggaagagagcgcgtctggttttgtgcgtctgttggatgccgcaggtctgtcgatggcactgaacaagtcggtagtaaataacgatccgcaagggtatccgaaccgcgttcgtcagcagcgcgcaacgggcatttgggtctatgaacgttatcctgccgtagatggtgcgctgccgtacaccatcgatagtaagacaggggaagttaagtggaaatatcaggtagaaaacaaacctgatgacaaaccgaagctggaagttgccagctggctggaagatgtagatggcaaacaggaaacgcgttatgcctttattgatgaggccgatcataaaacagaggattctctgaaggctgcgaaggagaaaattttcgccgcgttcccggggctgaaagagtgtactaatccggcatatcactatgaggtcaactgcctggaatatcgtcctggcacgggggttccggttactggtggcatgtatgttccacagtatacgcaactaagccttaacgccgacactgcaaaagcgatggtgcaggctgcggatttaggcaccaacattcagcgtctgtatcagcatgagctctacttccggaccaatggtcgcaaaggtgagcgtctgagcagcgtcgatctggaacgtctgtaccagaacatgtcggtctggctgtggaacgatacgagctatcgttatgaagaaggcaaaaatgacgagctgggctttaaaacgttcaccgagttcctgaactgctacgccaatgatgcctatgcaggcggcaccaagtgttctgcagatctgaaaaaatcgctggtcgataacaacatgatctacggtgacggtagcagcaaagcgggcatgatgaacccgagctacccgctcaactatatggaaaaaccgctgacacgcctgatgctgggccgttcctggtgggatctgaacatcaaagttgatgtcgagaagtatccgggagcagtatcggaagagggacagaacgttactgaaaccatcagcctgtactcgaatccgaccaaatggtttgcaggtaacatgcagtcaactggcctgtgggcaccggctcagaaagaggtcaccattaagtccaatgcgaacgttcctgtgaccgtcaccgtggcgctggctgacgacctgaccggacgtgagaagcatgaagttgcgctgaaccgtccgccaagagtgactaaaacgtactctctggacgctagcggtacggtgaagttcaaggtgccttacggtggcctgatttatatcaagggcaatagctctaccaatgaatctgccagcttcacctttactggcgtggtaaaagcaccgttctataaagacggcgcatggaaaaacgatctgaactcaccggctccgctgggtgagctggaatcagacgctttcgtctataccacaccgaagaagaacctgaatgccagcaattacactggcggactggagcaattcgctaacgatctggatacctttgccagctcgatgaatgacttctacggccgtgatagcgaagacggtaagcaccggatgtttacctataaaaacttgccgggccacaaacatcgtttcaccaacgatgtgcagatctccatcggtgatgcgcattcgggttatccggtaatgaacagcagcttctcgccgaacagcaccacgctgccgacgacgccgctgaacgactggctgatctggcatgaagtcggtcataacgccgcagaaacgccgttgactgtaccgggtgcaactgaagtcgctaacaacgtgctggcgctgtacatgcaggatcgttatctcggcaagatgaaccgtgtcgctgacgatattaccgtcgcaccggaatatctggaggagagcaacaaccaggcatgggcacgcggcggtgcgggtgaccgtctgctgatgtacgcacagctgaaggaatgggcagagaaaaactttgatatcaagaaatggtatccagatggcactcctctgccagagttttacagcgagcgtgaagggatgaaaggctggaacctgttccagttgatgcatcgtaaagcacgcggcgatgaggtcagcaatgacaagtttggcggcaagaattactgtgctgaatccaacggtaacgcagcggacacgctgatgctgtgtgcctcctgggtcgcccagacggatctttcggagttctttaagaaatggaatccgggcgcgaatgcttaccagctgccgggggcgagcgagatgagcttcgagggcggtgtgagccagtcggcttacaacacgctcgcgtcactcgatctgccgaaaccggaacagggaccggaaaccattaatcaggttaccgagcataagatgtctgccgagtaagcccgtaggccggataaggcgctcgcgccgcatccggcatgaaataaggcgcaccgggttaacacatttgcccgatgcgcctgcttatcgggcctacagacggggaaagccgcgattatttgcgctggcagacacccgtaggacggataaggcgttttacgccgcatccagcaagttacaacaaacaacctttaaccatgctttttgatgtttttcagcaataccccacggcgatgcccgtcctggcaaccgtcggaggattgatcatcggcagttttttgaatgtggtgatttggcgttacccaatcatgctgcgccaacaaatggcggagtttcacggtgaaatgtcgagtgcgcagtcaaaaataagccttgcgctaccgcgttcgcactgcccacattgtcagcagaccatccggatacgtgacaatattccgctgttctcctggctgatgctcaaagggcgctgccgcgactgtcaggcgaaaatcagcaagcgttatccgctggtggagttattgacagcacttgcttttttgctggcgagtctggtctggccagaaagtggatgggggctggcggtgatgatattatccgcctggctgattgccgcgagtgtcatcgacctcgatcaccaatggctgcccgatgtttttactcagggcgtattgtggacaggactgattgcggcatgggcgcagcagagtccgctcacgctacaagatgcagtcaccggcgtcctggtgggatttatcactttttactctctgcgttggatagccggaatagttctgcgtaaagaagcattaggcatgggcgatgtattacttttcgccgcgttaggtggctgggtgggggcattgtcgctgcccaatgttgctttaatcgcctcatgctgcggcctgatatatgccgttattacaaaaagaggatcaaccacactgccttttggaccgtgtttaagtctgggcggtatagcaacactttatctacaggcattgttttaatgataaccacgtcattatcaaagtgacattttaactcttattaataaccttagagattatttaccatgtcgataaaacaaatgccagggagggtattaatatcgctattgttgagcgttacaggattattaagtggctgtgccagccataatgaaaatgccagtttactggcgaaaaaacaggcgcaaaatatcagccaaaacctgccgattaaatctgcgggatataccttagtgctggcgcaaagtagcggcacaacggtaaaaatgaccattatcagcgaagcgggtacacaaaccacgcagacgcctgacgcctttttaaccagctatcaacgacaaatgtgcgctgacccgacggtgaaattaatgatcactgagggaattaattacagcataacgattaatgatacacgtacaggtaaccagtatcagcggaaactggatcgtaccacctgtggaatagtcaaagcataacgtcgggtagatataaattggcgcgggttgtttttcgtgacgcacgaatttatctcattcaatggctgacaaaaattcgtcacactcttaaccagagacaatctcttaatacagacaaagagcatctgcgaaaaattgcacgcgggatgttctggctgatgctgcttattatttctgcaaaaatggcgcattcactctggcgctatatctccttttctgcggaatatacggcggtttctcaaccggtgaataaaccgagccgtgtggatgcaaaaacgttcgataaaaatgacgtgcaattaatcagccagcaaaactggtttggcaaatatcagcctgtcgccgcgcaggtaaaacaacccgaacctgtgcctgtggcagaaacgcgtcttaatgtggtgctgcgtgggatcgcctttggtgccagacccggcgcggttattgaagaaggcggtaaacagcaggtctatttgcagggtgaaacgcttggctctcacaacgcggtgattgaggaaatcaaccgcgaccatgtgatgctgcgttatcagggaaaaatagagcgtctgagtctggcagaagaggaacgttccactgttgctgtgaccaacaaaaaagccgtcagtgacgaagcaaagcaagctgttgctgagcctgctgtcagtgtgccagttgagatcccggctgccgtgcgtcaggcactggcgaaagatccgcagaaaatttttaactatatccagcttacgcctgtgcgtaaggaggggattgtcggttatgcagcgaagccgggggcagatcgttctctgttcgatgccagcggtttcaaggaaggcgatatcgccattgcgctaaatcagcaggatttcactgatccacgagcaatgattgctctgatgcggcagttaccttcaatggattccattcaacttacggttttacgcaagggtgcgcgccacgacatttccatcgcgctgcgctaccgactattctgcccgccttactggaagaagagctgaaccaggatatcgatgaactgcatttcgccccgttgaatatcgaccagcaactggcaaccgtagcagtgattcaccaacagcatatgcgcaacattgcgcagtggttgcaggaaaacggcatcacccgcgctaccgtcgcgccggactggatgtccattccttgtgggtttatggcttgcgatgcgcaacgggttatctgccgcatcgatgaatgccggggatggagcgccgggctggcgctggctccggtcatgttccgcgcccagctcaatgagcaggatttaccgctttcgctaaccgtagtcggcattgcaccggaaaagctatcagcatgggctggcgcagacgctgaacgcctgaccgttacagctctgcccgccattaccacttatggcgaaccggaagggaacctgctgacagggccgtggcagcctcgcgtcagctaccgaaaacagtgggcgcgctggcgggtgatgattctgccgatattgctgattctggttgcgctggcagtggagcggggcgtgacgttatggagcgtcagcgaacaggtggcgcaaagccgcacccaggcggaggaacagttcttaacgttgttcccggagcagaagcggattgtgaatttacgctctcaggtgacgatggcgctgaaaaaatatcgcccacaggccgacgatacccggctgctcgccgagttgtcagcgatagccagcaccctgaaatcagcgtcactttccgacatcgaaatgcgtggttttacctttgatcaaaaacgccagatacttcacctccagctacgggccgcgaactttgccagtttcgacaaactgcgtagtgtactggcaaccgattatgttgtgcaacaggacgcgttacagaaagagggtgatgcggtttccggcggcgtaacgttgcggaggaaataacatgttacgcgataaatttattcactattttcagcaatggcgtgaacgccagttaagccgtggcgaacactggctggcacaacacctggcggggcgttctccgcgtgaaaagggcatgttactggcagcggtggtgttcctgtttagcgtcggatattacgtcctcatctggcagccgttgagcgaacggattgagcaacaggagacaatattgcagcagctggtggcgatgaacacccgactgaagaacgccgcgccggatattattgcagcgcgaaaatctgccacaacaacgcctgcgcaggtatcgcgggtcatcagtgacagtgcttccgcgcactcggtggtcatcaggcggatagccgatcgtggggagaatattcaggtctggatagaacctgtggtgtttaatgacctgctgaaatggttaaacgcactggatgaaaaatatgcgctgcgggtgacacaaattgatgtcagtgctgctgagaagcctgggatggtgaatgtgcagcggctggagtttggacgggggtaaagtatcaggagattaatatcaataaaattactctcgttaacgtggcgagagtaattcccccagactttataagctaatttttttcgtgaaggttattgtcagatccaaaagcaaaaacccgccttgtgggcgggttcttaagaattagtggtgcccggactcggaatcgaaccaaggacacggggattttcaatcccctgctctaccgactgagctatccgggcaacggggcgcattaaacctgattcgcctcgtctcgtcaatcaaatttcttcaatttactgcagactgcacaatctatcatcactttgccgatattgcacgcattgtcaggcaaaccaggcggtccaggcggcggaaagcggcattgccagaaggagtgctggaagcatgttgaccaccgggaacattttaatgccacagatgcgtaatccggttgccagcagcaataaaccgcctacggcgctgaagtctgccatcatcgacggtgtggtcagcggtaaaatcagcgcggcagcccacgccagcgttaactggatgatcagtaatgggatactaatcaccgataccgcaatacccagcgagcaggcgaagatcatcgccgtaaagaaatcaagaaatgacttggcgattaaaatactcggatcgccggtcatcccttcgttcatcgccccgaagatcccggtgccgctggcgcaaaacaggacaataatcgcgacataattctgaataaaagattcatgcgctggcttcttacgtgagtgacgaaacagattttgtgctttggcgactgctgtattgacacctttctccagcaaacaaatttcgccaattagagcgccaagtagcgtagctaaaaccatcgctggaaggttggcacatttcaccaccagtaaaataccaatccccagcgatgccagaccaaaaattgatgtcatggagacgcggatacgttccggtaagcgttggctgagcagtgcgccgagaacgccacccagtaagactgcactagcgttgataaaagggccgatgaccacaagagttcctgttagctgtattgtttgattttcttattatgaccgtttggtgccgtcgatggcttgtttgttcgcaaagtcctggcttgcacgctttagcgaaaggtgccatgattgcgcgaattttctcctctctgtacggagtttgcccgatgcacgccatctccttacattctctcgcttatcgccgtttcgcgcgaaacgtttccctttctatgttactgctcatgcggtgaagttaacgcacgctcactgcaggacaacagtaaaatcagagcgtttctgcttttactgatgtctggcggtcggagctggtgaccagtttgacccatatctcatggggcagggttttccaccttgtccggtattcttacttccccgaaacgggtttgcgcttatgaaatcaatgaatattgccgccagtagtgaactggtatcccgactttcttctcatcgtcgcgtggtggcgttgggagatactgattttacggacgtcgcggcagtcgtcattaccgctgcggatagtcgcagtggcattcttgcgttgcttaagcgcaccggttttcatctaccggtgtttttgtattccgaacatgctgttgaattacctgcgggcgttacggcggtaatcaacggcaacgagcagcagtggctggagctggaatccgcagcctgtcagtatgaagagaatttgctgccaccgttttatgacacgctgacgcagtacgttgagatgggcaacagcacctttgcttgccctggacatcaacatggtgcgttttttaaaaagcatcctgccggacgccatttttacgatttctttggtgagaacgtctttcgcgccgatatgtgtaacgctgacgtaaaattgggcgatctgcttattcatgaaggatcggcgaaagatgcgcagaaattcgcagccaaagtctttcatgccgataaaacctattttgtgctgaacggcacatcggcagcgaataaagtggtgacgaatgcgctgttaacgcgtggcgatctggtgctcttcgaccgtaacaaccataagtcgaatcatcacggcgcgctgattcaggcgggggcgacgccggtctatctggaagcttcacgcaacccgtttggtttcattggcggtattgatgcgcactgttttaatgaagagtatctgcgccagcaaattcgcgacgttgcgccagaaaaagccgacctgccgcgcccgtatcgcctggcgattattcagctgggaacctatgacggcactgtctataacgcccgtcaggtgatcgataccgttgggcatctgtgtgattacattctgtttgattccgcgtgggtcggttatgaacaatttatcccgatgatggcggatagctcgccgctgctgttagaacttaacgaaaacgatccggggatctttgtgactcagtcggtgcacaaacagcaggcgggattctcacagacgtcgcagatccataaaaaagataaccatatccgcggacaggcgcgtttttgcccgcataagcggttgaataacgcctttatgctccatgcttctaccagccctttctatccgctgtttgctgcactggatgttaacgccaaaattcatgaaggggagagtgggcgtcggctgtgggctgagtgtgttgagatagggattgaagcgcgcaaggctattcttgcgcgctgtaagctgttccgcccgtttatcccgcccgttgttgatggcaaattgtggcaggattatccgacatcagtgttagccagcgaccgccgttttttcagttttgagccgggggcgaagtggcacggctttgaaggatatgccgcggatcagtattttgttgatccgtgcaagctgttactcactacaccaggtatcgatgccgaaaccggcgaatatagcgactttggcgttccggcgacgattctggcgcactatctgcgtgagaacggcattgtgccggagaagtgcgatctcaactccattctgtttttattaactccggcggaaagccacgagaagctggcacaactggtggcgatgctggcgcaatttgaacagcatattgaggatgactcgccgctggttgaggtgttgccgagcgtttataacaagtatccggtgcgctatcgcgactacaccctgcgccagttgtgtcaggagatgcacgatctgtatgtcagtttcgacgtcaaagacctacaaaaagcgatgttccgccagcagagtttcccgtcagtggtgatgaacccccaggatgcgcatagcgcttatattcgcggtgacgtggagttggtgcggattcgtgatgccgaagggcgaattgcggcagaaggggcgttgccttatccacctggcgtgctttgcgtggtacccggggaagtctggggtggggcggttcaacgttatttccttgcactggaagaaggggtgaatttgttgccgggattttcgccggagctgcaaggtgtttatagcgaaaccgatgcggatggcgtgaaacggttgtacggttatgtgttgaagtaagaataaaaaaaacgggtcaccttctggcgacccgtttttctttgcgtaattagtggctaaccgtctgtgtgcctgtcgggacacgaacgtgtttatatttgaacatcgccatgaacgcgaaggccagaaccacggagtaaccagcgaaaatcaaccatacggtctgccagtcggtaatgccgttttgggtgtacatctcaacaactttaccgctcacgatgccgccgaggatacagccgaagccgttagtcatcatcaggaacatcccttgtgcactggcgcgaattgccgggctaacttctttttcgacaaacaccgaaccagagatgttgaagaagtcgaatgcgcaaccgtaaacgatcatcgacagtaccagcagtacagtaccgaacggagtcgggtcgccgtaagcaaacagcgcaaaacgcaggatccacgccacaatactgatcatcattacgttcttaataccgtagcggcttaagaagaacgggatggtcagaatgaacagggtttcagagatctgcgaaatcgacatgatgattgacgcatgctgcacaataaagctgctggcaaacatcggatctttgtcgaagctgtgcaggaaggtattaccgaacatgttggtaatctgcagttccgcgcccagcactgatgaatcccctaatgatttttatcaaaatcattaagttaaggtagatacacatcttgtcatatgatcaaatggtttcgccaaaaatcaataatcagacaacaaaatgtgcgaactcgatattttacacgactctctttaccaattctgccccgaattacacttaaaacgactcaacagcttaacgttggcttgccacgccttacttgactgtaaaactctcactcttaccgaacttggccgtaacctgccaaccaaagcgagaacaaaacataacatcaaacgaatcgaccgattgttaggtaatcgtcacctccacaaagagcgactcgctgtataccgttggcatgctagctttatctgttcgggcaatacgatgcccattgtacttgttgactggtctgatatccgtgagcaaaaacggcttatggtattgcgagcttcagtcgcactacacggtcgttctgttactctttatgagaaagcgttcccgctttcagagcaatgttcaaagaaagctcatgaccaatttctagccgaccttgcgagcattctaccgagtaacaccacaccgctcattgtcagtgatgctggctttaaagtgccatggtataaatccgttgagaagctgggttggtactggttaagtcgagtaagaggaaaagtacaatatgcagacctaggagcggaaaactggaaacctatcagcaacttacatgatatgtcatctagtcactcaaagactttaggctataagaggctgactaaaagcaatccaatctcatgccaaattctattgtataaatctcgctctaaaggccgaaaaaatcagcgctcgacacggactcattgtcaccacccgtcacctaaaatctactcagcgtcggcaaaggagccatggattctagcaactaacttacctgttgaaattcgaacacccaaacaacttgttaatatctattcgaagcgaatgcagattgaagaaaccttccgagacttgaaaagtcctgcctacggactaggcctacgccatagccgaacgagcagctcagagcgttttgatatcatgctgctaatcgccctgatgcttcaactaacatgttggcttgcgggcgttcatgctcagaaacaaggttgggacaagcacttccaggctaacacagtcagaaatcgaaacgtactctcaacagttcgcttaggcatggaagttttgcggcattctggctacacaataacaagggaagactcactcgtggctgcaaccctgcttactcaaaatctattcacacatggttacgttttggggaaattatgaggggatctctcagcgcgtaacgttttccggctcaacaagagaaggcgcttccgtaatgtacgccagctcgtttttatcccaggcgcgtttttcgccgaaggccagccagtagtttttatcattacgcgccatcagaatcgggaaggccgcgttggagatattcaccaccgcctgaccgcgcgcattacccgtgctgccatagaagttggtggagtcatggaatacatggaacttgctgacagatttgtagttcgtatccacgccccacagcttgttgataacgccctgaatctggccgtcattaacattgcgcgtcgtcagcgagaaccagcgagcctcgttacaaccatcggttttcgcacaaatcgcggtatcgatctctttggcctgacccgtattaaactgctcaataaattcgttaggcagattaacgacttgctcaccttcccccagcgtcgcaccgttggataacgagagattgataatctcgttgatcacgttgggatattcggcaaagaccttgcgtacatcgtccggaacaacacgggtattattttgcccggtcgtcgaatagcgatgaataagctgatcaatattcgccccgcgaacttcatcacccagttcagtcagcgcaatggtcgacttattgccgcgcactgaacccagttcaaaggtatcgataccaaaggagatggtttcgccccagctaaaggaaaattcaccattttcccctgtcacgccacggcctgaattggtgtagtagttgacgccagcaacaccatatccctggctatcgaccagtcgaccttcagagagaatgatttcagtgggttgatactgataaaactgttccgcgttagccgacacgaaggaagcgttcagatccggttttgttcccggcgtggtgacgggcacgaccggtgaagtatgagtggatggcgctttatcggtcgcagcattgttttccacctcttcattgaccagctttttgaactcttccggtgccagatcgatttgcttatacagcgagtcgaagcgtttactctcgatcaccgaggagaacgtcagacaaacctgttctgtattcgccggacagctgttactggacgttaccagcgaaaccgcattgcttttcttgtcatcggagcccgccagttcttgcgcgtcctcaaggctaaacgacactttttcaaccgcacgcaagctacgcgcagcttctgactgagtgttgaaggtggcaattgtcgtgttacccgccacgcaagtaacgtcctcgccaggtttaaatgtaaagccatcgctggattcaccattacaggtagcaccagttacccgctggcttccgcccagggtcagataacccgttttcgtaggaacaggttctggctccggttctggtgttggttcaggatcaggtatcggttctggcgtaggctctgggtccggcgttggctcaggcgtcggctccgggtttggtgttggatcaggtttcacttccggcaaagaccctgttccagaatctacaggcggcgtatcggaggaagatccggaaccaccgccatcacaaccggctaacagggttgcgctcaaaatagccgctaaaagcgatttcttatatttaaatttcttattcattaataacgcaagtgacaaaacaatgttaaaaaattcgtaactgggagaaatagttttatgctttatcttctctaataacttcctccattcttaagaaaacgacatcattgatagaaaacaggtgaaatttataagaataacccctatacgatgtctatctggctatttttacgaaatttcaacaaacaaaaaattaacaacatttcacaacgtaactatataaatttgttggtagttttaacgattaagattgcaaaagcaacagatagaacggtgtttgctcatcaagcgaacataattaatacagacttgttttgcgtgataaaaaaatagatgttctcacgctcttaattatttagcaggttatctgaacgcaaaacattattgctgcatggataataaagcgagaaatgattttcaattaataagacagaataatgtaaatgaagccggatgatattaacgatcatccggctttattgatttacgagactaacatcccggtaaacacatacgcctgcagcagggtgataatgccgataacgctggcaaaaatcagactgtgcttcacggtgtagcggaacagttcagattctcggcccaccatgcccgtcgcggcgcaggccacggcgatagattgcggggagatcatcttgccagttacgccgccgctggtgtttgctgccaccagcagggtgtcagagacgttgatttgctgcgccgtggtcgattgcagtgaaccaaacagggcgttagaggaggtgtccgagccggtaaggaatacgcccagccagccgagaaacggtgagaagaacgggaacatcacgcctgtacctgccagtaccagcgccagcgtggtggacatgccagaatagttggtgacgaaggcgaacgccagcaccatgccaatcgacagtatcggccacttcaagctaattagcgtttcggcaaagacgccaatacctttcttgatccccacaccgaggatgaagatagagataatcgccgcaataaaaatagcggtgccgccagccgagagggggtcgaatttaaacaccgcatccattggcgttggttgggcgacaatgggtgccgctttcaacacttgttgatgcaaatgagggatctggaaattaatcaccagtgaataaaacgcgccgcccggagcaaataacgctttaaacggcttcatggtccagatggtgaccagcaccgttaagattaaaaacggtgaccacgctcgaatgatttgccccagactatattctgaaggcacgggaccgccagaagatggcttatttaccaccatcgcacctgcggattgtcccatgctgattgccgtttcggtatttttcggccgccagactttaaggaataaagcgagtgagacgatactcaccagcgccgaagtaatatccggcagttccggaccaatatagttagaggtaaagaactgagtgacagcgaagcttcccccagcaaccagcgccgctggccacgtctctttcacccctttccagccgtccatcattgctaccagccagaacggcacaagaaccgacaggaacggtaactgacgtcccgccattgcgccaatgtggaacggatcgattcccgttacctgaccggcgaccagaatcggcacgcccaacgcaccaaacgccaccggcgcagtattggcaatcagacacagccccgccgcgtataacggtttgaagcccaggcccaccagcagcgcaccggtaatcgccaccggcgcaccaaagccagccgctccttccagcaacgcaccaaaggagaaaccaatcagtaacacctgcaaacgctgatcgtcggtgatggagataaccgagctgcggataatatcgaactgcccgctggcaacggttaatttatacaggaacaccgccgcgacaataatccacgctattggccataatccataaataaagccatagcccgcagcagcaaatgccatatcaatcggcattttaaaggcgaatattgcaatcaggatagataatataagggttattgctccagcgacatgtcctttcagacgtaataccgcgagtgcaacgaagaagaatattatcgggatcagggcgaccagagcggatagccccagtcctcccatcggcatatacatttgggtccaggtaaccatattgttcagtctcttattatctttatatgcttgatatacttaaggttgtaataagcaaaagaggactgaactgtaaaatataggcgttatactttacagcaacagtacgccgctaacgcaattgctacctctggcataacaagtatatcgggtaagggtttctgttccgcacacgcagacgcagagtatcgttaagatgtccatattgttgttttaggcccgctagtaatgcgctacgggtatttaatattgttaaaccctgataatcgctccggttatttccgggataaatgtactaccgcagttactatcatagccccgacaataaaacttgccggggcttttttgacgctattaatgactttctttttcgcgtaaacgccaggcgtgtaataacggttcggtatagccgtttggctgtttcacgccgaggaagattaaatcgctggcagctttaaaagcacacgagttagcgaaattccccgccatcggacgataagccggatcgccagcgttttgctgatcaaccactttcgccatattctccagcgacgcctgcacctgttctttggtcagaataccgtgacgtaaccagttggcgatatgctggctggagatacgcagcgttgcgcggtcttccatcaacgccacattgtgaatatccggcacttttgaacaaccaatcccctgctccacccagcgcaccacgtaccccagaatcccctgcacgttgttatccagctcttgttggatctcttgcgccgaccagttagcgttttcagcaaccggaatagtcagcagatcgtccagcagcggttcaaattcagcattgaactcggtctgggcaatgttggcttgtacgctctgtacgttggtttggtggtagtgcagcgcatggagcgtagcagcggttggtgacggaacccaggctgtgtttgccccggcacgcagttggtcgcccttctggctgtacatgtctgccatcaggtccggcattgcccacatgcctttaccaatttgcgctttaccgcgcagcccacagaacagaccggaaagcacgttattacgctcgtaggctttgatccaaggcgtcgatttcatctgatttttacgcagcatcgggccagcttccatcaccgaatgcatttcatcgccggtacggtcgaggaaaccggtattgatgaacgccacgcggttgcgcgcctgagcgatacagctacgcaagttcagcgaggtccgacgttcttcatccataatgcccattttcagggtattcggtgccataccgagcattgtctcaatgcgggtaaacagtttgttggcgaacgccacttcctgcggaccgtgcattttcggtttcacaatatagacgctgccagtgcgcgagtttttctgcacttttaaatcatagagggcaatcgcgccagtcatgacgccatcaagaatgccttccgggatttcattgccttcgctgtcccaaatcacaggaatggtcatcaaatgacccacgttgcggataaacagcagcgagcgtccgtgcagagaaatttcagagccatcggcggcggtgtaatgacgatcgtcattcagtttacgcacgatttgccgaccgtttttctccattttctcttgcagagtcccctgcatcaggcccagcaggttgcggtacagcaggattttatcttccgcatcaaccgccgcgaccgaatcttcgcagtcgagaatggtactgatagcagcttcgacgataacatcgttgatgtgcgccggatcgtctttgccaatccgcccattggcatcgatttgcagctcaatatgcaggccgttatttttcagcaaaatgcaggtcggcgcagcggcatcgccacggtaaccgacaaactgtgctggagtacgtaacgtggtttctttaccatttttcaactggatgcgtaattgtttatcaaccaccttaaacgccaccacatcctgatagctgccgttttccagcggtagagattcatcgaggaaacgccgaacccaggcgataacctgctcaccgcgttgcggatcgtagccgctgaccatcgccccttcctgcgggatgatgtcgctgccgtataacgcatcgtacagtgagccccagcgagcgttcgccgcgttcagcgcgtagcgggcgttcattgccggaaccaccagctgcggccccgcctggctggtgatttcgctgtcaatgcccgtggtttccaccgtcacgcgctccggttgcggcaccaggtagcccagttcacgcaggaaagatttataggccgctttatcttttaccggccccggattgctgcgatgccactcatcaagcgctgcctgaatgcgatcgcgttctgccagcaactgacgattttctggtgccagatcatgaacgatctcatcaaaattgcgccagaacgccgcagcgtccagccctgttcccggtaaaacttcttcatccacaaaacgtttaaaattggcgtcaatgcgtaaacggctctgggttatggtttgactcattgtttatctcctcgttttcgcttatttcgccaacaccgctgctgccgctttcgcgacctgcgcatcctgtgctccggttaaaccagaaacgcccacggcaccaataatttgcccatccacaacaaccggtacgccgccttccagcgacgttaataacggcgcagtcacgaacgcggtacgtccgttgttcaccatctcttcatagcccttagtttcacgacgccccagcgcggcggtacgcgctttctcctgggagatataagccgcaatcggcgcgcaatcgtccatgcgacttaacgccagcagatgaccgccgtcatcggcaacagcaatggaaacagaccagttatttttctgcgcctcttcctgacctgcggcaataattgcactcgccatttgctggctaagaatgactttagttttcattttgttattccttttcaagggcttgttctacaatttcaatccagtgacgcacagaggtacgaccggcgctcgccagatgcgtctggcaaccaatgttggcggtgacgatcatttccggtttgccgctttccagcgcattcattttgttatcccgcagctggcgtgccagatcgggatgcgttaacgcatatgttcccgctgaaccgcagcacagatggctgtcgggaacgtccgttaaggtaaatccaagacgaagcaacactttttccacttcgccgttcagcttttgcgcatgttgtagggtacacggacagtggaaggccagctttttatcgccgcgaattgccagtttttccagcggttcctcgcgcagaagttcgactaaatcgaccgccagttcactgacctgacgtgctttatcggcatataacgcatcgtttttcagcatctgcccatactctttgacaaacgcgccgcagccgctggcggtttgcaaaattgcctcggcacctgcttcaatcgcgggccaccaggcatcaatattattgcgcgcccgtgccagccctttctcctgcgcattaagatgatagtccaccgcgccacaacagcctgcttcgttagctggcatgacgctgatccccagacgatccagcactcgcgcagttgccgcgttggtgttgggcgaaagcgtaggctgggcgcagccttccaacattaaaacccgacgcttatggcgcagcggcggacgcggtttagctttcaccgtttcagcaggcagttttgctctgacctgttccggtaaaaacggtcgcagcaccagccctacctgcgtcagcgcacggaagaccgccggacgcggcactacctggcgcaatccttcgcgcagtattcgctccggcagtgggcgtttcactttctgctcgacaatatcacgcccgatatccagcaaattgtgatagcgcacaccagaaggacaggtggtttcacaattacggcaagtgaggcagcgatcgagatgctcctgtgttttaagcgtgacttcgttgccttccagcacctgtttaatcagatagatgcgcccgcgcggcccgtccagttcatcgcccagaagctgataggttgggcaggttgcggtacaaaatccgcagtgaacacaggcgcgcaggatgctgtcggcttccagcgcgcgcgcgttctgccgcatctcttcagttaattgggtttgcatagcctgctcctcaaagttccgcgtacatgcgaccggggttaaacacgccgcaagggtcgagctgctgtttaagctgctggtgatagcggaataaaggagccgatagcggggcaaagccaccatctccggcactaaagcgggtcgcatgaccgccagcgttgcgggcgatgcgatggatttgattgtcctcggctgtcgatttcagccagcgtaacgccccgccccagtcgatcagttgctcgccgggtaaatccatcatcggcgcatcactgggtaatgaaatgcgccataaggtacctggtaacgagaagaacggcagttgttgttcacgcaattgctgccagaactgaccggcaacctcttcgccacccagcagttcacgcgctgcttttaccgatccttcgccgccctcaaggcggatccacaacgcattgtcgaagtaacataagccactaatgggtaatggctggagttgccactcggcgatttcactcatggcttcttgcaggctgatttcccgacgcaggctcagggaggcgcgcggtcgcggtaacactttcattgagatttcagtgagcacgccaagacaaccgtagcttccgaccattaaccgtgagagatcgtatccggcaacgtttttcatcacttcgccaccaaaacgcagatgttttccagcgccggtaatgatgcgcgtgccgaggacaaaatcgcggaccgaaccgctccacgggcgacgcggccccgccagcccgcaggcgaccatcccgccccaggtggcttcttcaccataatgcggcggctcacaggggagcatttgccccgcgctttccagcgccgcttcaattgtcaccagcggcgttccgacacgcgcggttatcaccagctcggtcgggtcgtaattaacaatgccgcgatgacaacgaacatccagcgtttgcccggtgacagggcgacctaaaaaggctttgctattgctgccctgaatcaccagcggcgttttatcgctaatcgcctgattcacctgctccagcagcgcctggctgtaatcacactcgcgtagcatcagaaacgctccagttcagggaaaggtaaatgaccgtgatgcacatgcatggcaccaaattcagcacagcggtgtagcgtgggaatgtttttcccagggttcagcaaaccatcggggtcaaacgccgccttgaccgcatggaaggtcgtgatttcatcgctgttgaactgggcgcacatttgattgattttttctcgcccgatgccatgttcgccactgatgctgccgccaacttcaacgcagagttcgaggatcttcccgcccagctcttccgcgcgggcaaattcaccgggttcgttggcatcgaaaaggattaacgggtgcatgttgccatctccggcatgaaagacgttggcaacacgtaaatcatattgctgcgataaacgggcaatgccttccagtacgccaggcagggcgcgacgcgggatggtgccatccatgcagtagtaatccggggagatacgtcctaccgccgggaacgcatttttgcgaccggcccagaaacgtacgcgctctgcttcgtcctgtgccagacggacgtcagtcgcgcccgctttcaacaagatgtcgttaacccgctcgcagtcttcctgtacgtcagactccacgccgtccagctcgcataacaaaatcgcttcggcgtcgacgggataaccggcatgaataaaatcttccgccgcgcggatcgacaggttatccatcatctccagcccgccggggataatgccattggcgatgatgtcaccaaccgcaagtccggctttttctaccgagtcaaagctggctaacagaacccgcgccacgggcggcttcggcagcagttttaccgtcacttcggtggtcacgccgagcataccttccgatccggtgaacagcgccagcaggtcaaaaccaggtgaatccagcgcgtccgatccaagcgtcagtgcctcgccgtccagcgtttgcacttcaattttcagcaggttatgtacggtcagaccatatttcaggcagtggacgccgccggcattttcagccacattgccgccaatggaacaggcgatttgtgaggaagggtccggtgcgtagtagagattatgcggtgcaacggcctgggagatcgccaggttacgcacgcctggctgcacgcgcgcgcggcgaccaacggggttaatgtcgaggatctctttaaagcgcgccatcaccaacaacacacctttttccagcggcagcgcgccaccagaaagcccggtgcctgcaccacgggtcaccaccggtacacgcaggcgatggcagacagccagaatcgctgtcacctgttccatttgcttaggcagaacaaccagtaatggacgcgtgcgatacgcgctcaacccgtcacactcgtaaggaatgatctcctcatcggtatgcaggatctcaagtccagggacatgctcacgcagtgccatcagtaccgatgtgcggtcgacatcgggtaaagcgccatcaagacgctcttcgtacaagatgctcatgagtaggcttcgctttgttgtgttgtgtggcagctgatttttgcgcgctgcttctgtgaacagttattaagcgggcttttcgttttcgtctatctctttagctaccggtcagaccattttttttccagctctgtgaccttgtcttggttaactcaatgttaaattgatgtaacataatcacttacgtgatgtgcgtgttttgcgagttaagaacagaaaaattggtcctacctgtgcacgaggtccgggaatgaaagatgaacgtcgccctatttgcgaagtggttgcagagagtatcgaacggttaattatcgacggcgtactgaaggtcggtcagccgcttccctcggaacgtcgactgtgtgaaaagctcggcttctcacgctccgcactgcgtgaagggctgaccgtgctgcgcgggcgcgggattattgaaacggcgcagggtcgcgattctcgtgtcgcacggcttaatcgggtgcaggacaccagcccgctgatccatctgttcagtacgcagccgcgaacgctgtacgatctgctcgacgttcgcgcattactggagggcgaatcggcaaggctggcggcaacgctgggaacgcaggctgattttgttgtgataacccgctgttatgaaaaaatgctcgccgccagtgagaacaacaaagagatttcgctgatcgaacatgcgcagttggatcacgctttccatctcgccatttgtcaggcttctcacaatcaggtgctggtgtttacgctgcaatcattgaccgatctgatgtttaattcagtgtttgccagcgtaaataatctctaccatcgaccacagcaaaaaaagcagatcgatcgccagcatgcgcggatctacaacgcggtgttgcagcggctgccgcacgtcgcccagcgcgcagcacgcgatcatgtgcggaccgtgaaaaagaatctccacgatatcgagctggaaggccaccatttgattcgctcggcggtgccgctggagatgaacctgagttagctggtattaaatctgcttttcatacaatcggtaacgcttgtacggctccgccccaatgcgttccagcatgttattcatgcctgtattggtttcgaggatccatgacatctccagcgcatcgatcttccggcgggcaaacggatcgcgtaaggcttcaatcaataacagcgcaatcaccgggccgatgcggctgaactgatactcgtcgcgcacgcccatcagcggtactcgcgcagttcgcacaccgctgactttcaaacgccacagcaattttgcccagccgaagggaaagagcgatccgttcagatcggcaatcgcctcgttgatgttcggcaagccgacaataaacgcgcagggtgcagaatcaatctcagcgatatagatcatatcgtccggcaccagatatttaagttgatcgcccatggtcgcgaattcatgttcggtaaacggcacaaatccccagttgtgctgccagccagagttgaaaatctcacgcaggatctgcatctcttcggcaaaccgctgacgattgatgcagcgaatggtcacctttttgcgcacctgatccatcagtttttttagcgccggagagaaagtgagatcggttcgctgcatccaccacgccagtaaatcaatgcctttgtgataacccagttgttcaatatgcgcggcataccacggtttgccgtgtggcatcatcgcacagggtggtgtgtcaaaaccttcaatcagtaatccgctttcctgattgatattcaggctgaaaggaccgctgatcttacttgcaccttgtgacttcaaccacgcttccgctgcgccaaacaacgcggcaaaaacctgcggatcatcaatggcgtcaatcatgccgaaatgaccggtatctttgccgtaacgctcgcggtgcaaggtatctatttgcgcggtaatacgcccaactatctgccccgctttttttgccacccacgcctgccagatgatatggtccgtccccggatttttcgcagacaaatgctcgttgcgttcaatgaataaagggggtatccagtttggatcgtcgggataaagtgatgacggaaaagcgataaatgccttaaggtcatttttattaaggaaggtgcgaacaagtccctgatatgagatcatgtttgtcatctggagccatagaacagggttcatcatgagtcatcaacttaccttcgccgacagtgaattcagcagtaagcgccgtcagaccagaaaagagattttcttgtcccgcatggagcagattctgccatggcaaaacatggtggaagtcatcgagccgttttaccccaaggctggtaatggccggcgaccttatccgctggaaaccatgctacgcattcactgcatgcagcattggtacaacctgagcgatggcgcgatggaagatgctctgtacgaaatcgcctccatgcgtctgtttgcccggttatccctggatagcgccttgccggaccgcaccaccatcatgaatttccgccacctgctggagcagcatcaactggcccgccaattgttcaagaccatcaatcgctggctggccgaagcaggcgtcatgatgactcaaggcaccttggtcgatgccaccatcattgaggcacccagctcgaccaagaacaaagagcagcaacgcgatccggagatgcatcagaccaagaaaggcaatcagtggcactttggcatgaaggcccacattggtgtcgatgccaagagtggcctgacccacagcctggtcaccaccgcggccaacgagcatgacctcaatcagctgggtaatctgctgcatggagaggagcaatttgtctcagccgatgccggctaccaaggggcgccacagcgcgaggagctggccgaggtggatgtggactggctgatcgccgagcgccccggcaaggtaagaaccttgaaacagcatccacgcaagaacaaaacggccatcaacatcgaatacatgaaagccagcatccgggccagggtggagcacccatttcgcatcatcaagcgacagttcggcttcgtgaaagccagatacaaggggttgctgaaaaacgataaccaactggcgatgttattcacgctggccaacctgtttcgggcggaccaaatgatacgtcagtgggagagatctcactaaaaactggggataacgccttaaatggcgaagaaacggtctaaataggctgattcaaggcatttacgggagaaaaaatcggctcaaacatgaagaaatgaaatgactgagtcagccgagaagaatttccccgcttattcgcaccttccctaaatcaggtcatacgcttcgagatacttaacgccaaacaccagcgaaatgagcggcttgccgacgatcaacaccgcgagcgccaccagaataccgattccgcccgccagtaaaccggacttcacacctaacaaccacggtctggtggtgcgcggatctaaacgcatcacctctgggtaaaaacttttacccagcaaacccgctggcgttccggcggcgtcgaagaatgtcatggcgattttaaataacccggcggcagcgggtcctaacacgatccccaccaacactgtgctgcacgagttacgcgccgaccagatggagtgggcaatgttggttgaccagacaaaactccacgcgcctttaatgtatcgggcagactcaaacagattcaatttgaaggcgttatggatatttcggcggcgtaattcgcgcgcggcaaaccaccagtacatggtgccgccaaccagattcgacacgtaccaggcaataacaaaacccgcaaaaccaaagtcaaaataccaggctacgacgctccccgctgcgcgcagaaaaggtttcgtcgcctgctgtacagcaattaaatcgaagcgatctaccgcacgcagaatgccggtcggcgtggaggaagccattgaaggaatgagcgtgcaatagagcgctgccagccaaaaactttggtcatccagacctaatgaatgggaaaggaatggcagtaaggcaatgccaccgacaatcgccaccgcgccgctgacgatatccagcgagaaggaaaatgagacgacattgcggaattgctgcggattattgttggttaatgctggtgttccgtactgaaccaccagttgccatgtctgaaacttaataaaatcgctgatcgacttggcgtacgattgcacaatcaccagtacgccaaacatggcgggcgtcatccctttaccggcacacgagagcgccaacagacccagcaaggcgctcacgacattactggagcctaaccaggcgctattgcgaataatggtgcgaaacgcgccatctgcaaaccaatgtttgatgttaaaacccgccaattcagcctgaccttatcgttgatagtaaaaagtatcccgccagccttaagttaaacttcggcggtcagaaacgatggcaaccagagaaaccgccttctgtgcctgttccagcacttcgctgtagggcgctctggaatcaatctcaagaatttttgtgccgttatagccaatcttcgacatgacaccgattttgtcctgcagctcggcatagtcatggtcaggcttgcgggagatggcagtctcaatatcaatgcccaggcgaataattaattccgggcgatattgcgccatttgttggtataaacgccgttcgcgctgcgccagaaacatgctgattttcccggtcgcacgttcgacgccaatccccggtccatcataataaaagcccgaaatttcagcctgcgggaagcgatcgctgaccaccagaacgccactttgcgccagtcgctgaaccttgcgtagattcgccattcttcgcagcgagaagcagtacataatcaccgccgcccatagcgccggagatttggttttcatgctttgggttttcgaggatttggccgccagtcgccgttccagccagacgccaaccaacggcaatcgtttgattttgtcgccgtcttcgccggagagcagccccagatagcgccgctcggtttgccagtgttgttgcagcgatttcaccaggtcggtggtcagtgtggatttaccggtgccatcacacccgaccaccgcaatcagccccggaatgtagttgggctgcggcgcggttgtactattaacagtttgagtttgtagtgcatccattcgttaaatcatcccctatccattttggtgatcaggaaagcgcggcgtgaattgcgcgtagtgacgcttgcagaatttcatcggcggggtgtcgcccatccagttcaaggatctttgcgccattgaatgtcagttgcggcgtaacggcgattttttcctgtaacgctgccagttggtggtcaggtttacgcgcaaacgcggtttgttcatcaatgccaagacgaatcaacaatacgggcaaataagatgccatccattggtacagcttcagctcgcgctgccttaacatttttatccaaccgttaccgcccgtggtttttgccaattgcgggccatcaaagcgaaaccccggcacttcaacctgcgggtagcggtcggtgatgagcagaaagccttgctggcttttacacaacattttgcgaaacttgtacgcccgccagcaggaaagcagatagataaccagtgcagtaatattgccaggcggtgttgagggcttttcgtgcacatgtgccgctttacttcgcagataacgcccaaaaggtgcgccaataacagggagctgtgaaatccattcgccaattcgcccggacgattgcccgagataaatgtgttctgttggcattcttgctgccagttcatttaccaggcttgccgtgagggtcgatttacctgaaccatcacatcctacaatggcaataacacgcactggcgtggaattaattattgacatattacgttgattcacgaaaaacccggcagtaaataatgtattgaatattacgtggtccgtgctcagaatatccgttcaaccttattgtgacaatggttaattgtgacattgacctgaattacgctttcataaaaacatattaaccaaataaatatttttaatggatatttaaattaaaggatatattcatgcagtcaataacacctccattaattgccgttattggtagcgatggttcaggcaagtcaacggtgtgtgaacatcttattaccgttgtcgaaaaatatggtgctgccgaaagagttcatttaggaaaacaggccggaaatgtcggtcgtgcagtgacaaaattaccgttgatgggaaaatccttacataaaacaattgaacgaaatcaggtgaaaacagcaaaaaaattgcctggaccagttccggcgctggtaattacagcgtttgtcgcccgtcgcttactgcgctttcgtcatatgcttgcctgtcgtcgtcgcgggttaattgttctaaccgaccgttatcctcaggaccaaattcctggcgcttacgatggtacggtgttcccacctaacgttgaaggtggtcgttttgtctcatggctggcaagccaggaacgtaaagcgtttcactggatggcgagccataagcctgatctggtcatcaaactcaatgttgaccttgaagttgcctgtgcacgtaaacccgaccataaacgggaatcgctggcgaggaagattgccataacgccacagttaacctttggtggtgcacaactggttgatatcgatgccaatcagccactggaacaggtgttggttgatgcagaaaaagcgattacggattttatgaccgcgcgtggttatcactagtcaaaaatggaaatgcccgatcgccaggaccgggcattttcaggaaggttaaatcaactgcaatgctatccagtacagcccaccagaaagaaaaattgccgccggtaaagtaaatacccacgccatcaggatgctggttaccgttttacgctgtaacccaccgccgtccaccaccatcgtccctgcaactgcagacgagaggacgtgtgttgtggagacgggcatcccaatataactggcaagaccgatagacactgccgccgtcatttgtgccgccatgccttgcgcatacgtcatgccgcgcttaccaatcttctcaccgatggtcatcgctacacgacgccagccaatcatggtgccaatgccgagcgccagtgctaccgccatgatgatccacaccggagcgtactcaatggtgcttaacatatcgctgcgaagttttttcagcaggttctggtcttctttactgacgcctggcagtttcgctagcttcgcggaggtatcagagatgcacagcataatgcggcgcagctggctgcgctgactcacgcttaacggctcgtaactttccatattgcctggcagcatcgttttaacgcgcgcaatagcatcaaaggtatttgccggatgacagtgaaactctgttacttgcgtgccatcagtcgatgctgcaggcaatggaggttccatcgcaatcaacttctgcggcagttcaggatgctgttgcaggtagtgttcgaagttggtaacggcatcgcgggtacgggtaatttcatagccggacgcattcatattgacgacgaagccagcaggggcaatccccaccagtaccagcattaccaggccgatccctttttgtccgtcgttcgcgccgtgcgaaaacgccacgcccgcagcggaaacaatcagcgcaatacgcgtccagaatggcggtttacgtttgccttttttctttttgcgatcttccggaatgcggtgaatacggtcacgctttttcgtcccgctccagtagcgtcgcagcaggaatatcaggcctcccgcaatgaccaggccgacgataggggaaacaatcagcgaggagaaaattttggtcacttcacgcaggtttaacgcatccatcaccgatgagccggttaacagcgcgttggttaaaccgatgccgataatcgcaccaatcaaggtgtgcgaactggaggccggtaaaccgaagaaccacgttcccaggttccagataatcgccgccagcagcatggaaaagaccatcgccaggccgtgggttgaccccatattcagcaacaaatcggttggcaacatatggacaatggcataggcaacgctaagtccgcccaataacacgccaaaaaagttaaaaaatgccgccatcaccacagcaagttgtggttgcatggcacgagtataaataacggctgccaccgcattcgccgtgtcatgaaaaccattgattgcttcgtagaacaacacaaatgccagagcaagcaataacaaaagccctgtgtatatatcaaggccaacaaataaatttagcatatattagattacgccattttgaatttacgaacggacgcattatcagtgactttaacggcatgggcaaagtgaaatatcattttttaacgataaaaagagtgttatttcttgtgtatcagacaataagcattcattcaaaacctttagaaataatcaaaacacaggtattccactggttaatatattcacatatgaaatgaataaatattggaatatataaatattgaatattttgattaatccccgtactgattattcttcataatcagtacggggttgctacaacatgtattactttttcaccacaattaacggttcaatatcactctcttttttgatgaccagtgattcatcaccgcgcaaacacgtcccaccgtagttgccgccaacggtgaaggtacatacctgaatgtatttaccgtccactttcggcaaacaccacagttgctgatagatgtttttctgctcggcaaatttaccgctggttttgtccagcacctcttcatgatggctgacgaggtcgatattgctgccacagcgaccggcgatcggtttcactgcgtaacctgttttcaccagttcatcattaacagtgaaatcggtatccagcaggtaacgatggtgcgggaacagcgaccagaggatcggcagaatcgctttgttgccggggatcaccgtccacagcggctcaaagaccagcacttccgggcgcagcaatacgtcgataagacgcacttcgttttgcggatgaccggtacggattggcaccgcagcaaactcacggtcgctaacttcacgaatctgatcaaacgcggtttcccacgcccaggttttccacacgcagttaaccagtcgcccttccccatcaatcagttgcccggcagcatcccagcccagttcatccaatccacgcaagatacgcgtttcaaagcccgcctggtgcagcgcctgctccataaactgcgcgtgatagttttcctcgatatctttgtcctgcatgatatggacaaacggacgtgcacgactgtgtttccaggcaccagccaattcgttaatcagcccttccgccggattgaagccgttgcctttatagccctgctccgcccaacgttcgaggatcaagcccgcttcggtatgacaggaggcggagtcggcgttgtactcgtaaaccttcaggccacgctcatccatgcagaaatccatacgaccagtgatcatatggtgacggcgacgctgccaggagagacgcaaacgtggccagaggattttcgggatgtcgaacagcgccagcaggttgtcatctttcagcaccttgtcggttgcgtgaagatacatcaggtgcagctcgttggtggctttaattagctcctgctcggcactctcggtaatggtgtagtaatgataaggatcctgattgatcacctgaccgttggcctgcacataggcgttttgcagcggatctttttcatccagccatttaccgtcaaactggcctttgttttccaggcgcgctccgctgattttcagcagctcgcctgcaatttccggctgcggtaagctgtattcagtatcttccgtctggatcatccagcccagaatggtggtgtcatcaaaagtgtctttcagggtatagcagccgttttcgaccaccatctccagctcgcgcgtccactgttgcccttgcggcaacggggaatgaatcacgttctgttccgcaatacggactttgttgccatgcaattgggtaatgatggcgacatggccagtgtctttaaattcaccgcctttatcccagataagaagcgcacccgcgaccggcgcacgcggcgagccgttaggaaatgcctgcaatggcaggatgttgtcattaaccacttctcgcaggaagcgcagcgagaaaatctcccacgccatacccacgtcagtaaagaccacaccgtaattcagaaagagaaaacggcgagcaaattcaacgcattgccacttgtggcccatatattcgtcgtcgatatagctacggaatacggcgtcatcttcgtattcctgcggatcgagagaactgtaatctgaagagtagattgctaccccacctggggcgtagcccaataatgtcccgaacggggcatcctggctggtcgttcctttgctcatcactttacctttaacaatacaacctaagcagttggcgtaattgttgtgctctgattacctgctcagcgacattaaccggacagaggtcagactaatcatacacctcatcgcagcggctggcgcaaagggttaaaaaattcacattctgtacagcaagtgacctgctacactgcttcaacactaccactcagaaggcaactcactatgacagacaatacttatcagcccgcgaaagtctggacgtgggataaatccgctggcggcgcgttcgccaatatcaatcgcccggtttctggtccgacgcatgaaaaaacgctgcccgttggcaaacacccattgcaactttattcgctgggaacgccgaacggtcagaaagtaacgattatgcttgaggagctgctggcgctgggcgttactggtgcagagtacgacgcctggctgattcgtattggcgatggcgatcaattctccagcggctttgtcgaagtgaacccaaactcgaagatcccggcgctgcgcgatcatacgcataatccgccgatccgcgtgtttgaatctggttcgatcctgctttatctggcggagaaatttggctacttcctgccgcaggatttggcaaagcgtactgaaacgatgaactggctgttctggttacagggcgcggcaccgttcctcggcggtggttttggtcacttttaccattacgcaccggtaaagattgagtacgccatcaaccgctttaccatggaagccaaacgtctgctcgacgtgctggataagcaactggcgcagcataagtttgttgcgggcgatgagtacaccattgcggatatggcgatttggccgtggtttggcaacgtggtgttaggtggtgtgtatgatgccgctgagtttcttgatgcgggcagttataagcatgtacaacgctgggcgaaagaagtaggcgaacgtccggcggtgaaacgtgggcgtattgttaaccgcaccaacggaccgctgaatgagcagttgcatgagcgccatgacgccagtgatttcgagacgaatacggaagataagcgtcaggggtaagggttggtgttcgtcgcagcaagccatccaggccggataaggcgttcacgccgcatccggcaatcgtgcacaatgcctgatgcgacgctgccgcgtcttatcaggcctacgaaagctaatcatcacgcgctggtaatgtcgtaatccatttggcgcagtgcgtctaatgtggctttggcttcatcttcgtcgatgatgctcatggcaaatccgacgtgtaccagcacccactggcccagtagatcggcagggttaccttcacaaatcagggcgatattcacatcgcgcttgataccacatacttcaacctgcgcaagctggtgaatatcttcaccgacagccagcacctggcctggaacgccaatacacattattaactccggttattcaacttcaatacttttgacgatcagcgaatcgccggtatcgacacgcaaccgctcgccgtgacagagcggacactgcgcatcgtgctgatgaatctccaccacctggctgcaatcccagcaccaagcctgggcgggtttatagacgatatgtaaatcgcacccttgcgccaccgttccgtggcagacaatttcaaaactaaaacggacggcgctctcctcaacgcaggagagcgcgccaatttccagccacacggcggtgacgcgcttaacatcgtgctgctccgcctgccgttggataatttcaacggcgctctggcaaagagacaactcatgcattttcgccactcctgcgaccaaacagcagggcgcgacgccctgcgtgtggtacatccggattcgtgactggcagcgaaaggatcattcgtgcgcagtcatccgtcaggcgttggccctcttcaatcgacatgctgtgcgaaagcggcgacatcagcgaacaggagagatattgcgaaacaccgtccagttcgccaacggtaaaggtcatagtgccatacggcagttgcagaccaattttttcactcactttgcgcagcggccagagttgatccgggccggggaagataactgcactcagcatccacggggtgatcacacaccccgtccactgaccttcgaacagcgtaaaatcagaaacatacaccggcattgaaggatgcagaaaagagagatcgtgcatcgaacgccgggcaatttcttcaaacgctgcctgtacttgcgccttcggggaggtctggaaacctgctatctcttcagtcatgaatcgcctcccgtgggatggcttccacgccagattcacgcagcgcagccagaacctgctcaagcgcaggttcaatcattgcttcaaccgtcggcgttaagccgatgtgtggctccagcgattccgggatcacgccgaccagggtcagctttttcggaaactcgccggtgaagcgcagggccgacaagacgtcggccaggccaagctgatgcggagagattttgttggtaaacaacgccggaacttcttcatcccgcaggatcatcatcgttcccggcgcgttctttttcgagacaatggcatccgcaataatcaaatgatcgcgatttgccatgtcgccaagcagctccattcccgccgtgccgccatcgaggatctcaacataatccggcagaatgtatcgttgctctaacgcttcgacaatccgcacaccgatggcttcatcggtcagcaaaatattgccgacccctaagactaaaatacgcattacagaaccttcactgaaaccacttcgttgccgtcagcatccactacgtgtaccgcacaggccatgcacgggtcaaaggagtgaatggtacgcaccacttccagcggtttattcggatcggcaaccggtgtacccaccagcgactgctcgtaaggaccgacgtcatcattgaagttacgcggaccagagttccaggttgatggaacaaccgcctggtagttgctgatgataccgtctttaataaccatccagtgagagagcataccgcgcggcgcttcgaggaagccaacacctttgaattcacccgttgccggaatgttcggcttcacaaaggtggtgtgatcgcctttgccgatattggtgatcagtgcactgtattggttttgcaggatatcctgcaattcacagcagtgaacggtacgaccaataatacggcccagcgtggagtgcagctgtgccacttccagcgtgttgccagtcagtttctgataaatcgcaacgatttcattcagtttgttctgggtagattcgcgacctgccgccagtttcaccagcatattagccagtggccccacttctaccgttttgccgtagaaagtcggtgatttcacccaggaatatttcccgtcgtcagaccaaccatcataagccggaatggtggtgccttcccacggtgcctgcggcgcttcgtctttataccaggagtgcttcgcgctttcctgaatgcctttgatcaggtattcatcggaatgagaagtgatcggacgatacgaggacagatccgcattctcaatgtagccgcccgggaacaggaagctgccgtttttactgtcggtcgggaattccggcacgctcaggtagttcaccgcacctttaccgcgtgtcagccattccgggtagaacgcggcaataactgcggtatcaaccttataaacctgctcaacaaagtcgctcagtttgtcgatgaaagacttgatgtacatcaggcgctcaaggttcagcacgcccaaaccgtcgaggttgatcgggttcgcgacaccacctaccgccaggttctgaatgtgcggcgttttaccgcccagcagcgccacgacgcggttagcgtcacgctggcactccaacgcttgcaggtagtgcgctaccgcaatcaggttcacttccggcggcagtttcatcgccggatgaccccagtagccattagcgaaaatacccaactgaccgctggcaaccagatctttgatcttgttctgaactttggtgaactcttccggactgttcaggtgccaggtcgaaacgcctttcagcatttcggaggctttggttgggtcagcttgcagtgcagaagtgatgtccacccagtccagcgccgaaagctgatagaaatgaacaatatggtcatgcgtggtgtgcgcagccagaatgatgttacggatgtattgcgcgttaaccggaacgtcgatattcagcgcactttctgccgcacgaacggaagacagcgcgtgagtggtagtacatacgccacagatacgttgcacaatcatccatgcatcgcgcggatcgcggtttttcacgatctcttccatgccgcgccacatggtaccggaagcccatgctttcgaaacgacgccattttcgatttcgcaatcgatgcgtaaatgcccctcaatacgggttaccggatcaatagtaattctctggctcatgctttgctcgcctcatgacgattatgatcgttttgttttaaaggaggaagtatcggcagtagacgaatgagtacgatgtaagcgcaaatctcaatagccacaaaaccaatagaaatcaacagttcttcccaggtcgggaagtaggcgtaaccgccgcccgggttgaatgccaccagcgaataggtcagacgccaggttgcacaacctaacagtgcgctcagtgctgacaggaacagcatgcgggaatcattacgcagcttcgccacacgcagaacgaccagcgggaagagcatcagcaggacttcaatccagaacatcacggagtagaagtcaccggcaaacgctaacgacagcttgtcgcgatagataagctcgccaaagcgcagcacgatgaaaatcgccagcaacacactgatggtgttggtcagcttaacaaacagactcttttcatccggaccgttgccacgcagacccgcctgcaccagcgaaccttcaaagatgacaatcgagaagcccatgatgaacgccgtcagcagcgagaacagcggcaacatttcatagctctgccacaacggatgcaccttgtagcccgccgagatcatcagcgaccccattgaagactggtgcatggtcggcagcagcgcaccgagcgcgatgatgaagaacatcaccttgtttagtcgctgtagcgacaccttccaccccagacgttcaaacagtgccggagcaaactccagtgccatcacgccgatatagatggtcatacagaccgccgtctcgaacagtaccgagttcacgttgaagtgacccggaatgtagaagtacggcaggttccagtagcgacccacgtcgatagtgatcgacaagccacccagtgagtaaccaaacagactcgccaacagcgccggacgcaccagcggatggtattgcccacggttaaagacgtataccgcccacgccagcgcccagccgccacaggcaaagccggtgccaatcagcaggtcaaacgcgatccacacgccccacgggaagccgccgttcaggtcagagacagagcccagaccgaacaccagacgcttcacaatcaggagcatacagatgacgattaacggtccaaaaatcatgaccggtttactgatgattttgccgcccagcggttgtggatcatgactcatgatcgtctcctccgtcgtgatggtcgtttttggtgttgcgacgaaccagcacggttaagcccgccagcacagccagtggtagcatcatgcctttatacagggtgtgttgaatattttcggaacgcgcaccggtagaaagatcgtccagtttcggcaggtcgagattttcataaggcacacccgtcagtaccagaacctgagtaccgccgccctctttctcgccgtacagatgcggataatatttcggcaccgtatgcaggtaagtgtcgccagatttcagcgtctgacgcggatagtggtattcgctgccaggcttcagcgccagacgttttttcgcctccgccatcagctcttcacgcgtaccgaaaatcaccgcgcccgccgggcacacttctacgcagccaggtagaccgcctttatcgagacgttccacacctttctggttgcacagctcgcacttatgcagcgcaccaaacgggttgttgtagtcgtacttcggcacgttgtacggacaggcgaccatgcagtaacggcagccggtgcacacatctttgtcgtaatggacaatgccggttttcggatcttttttcagtgcagagaccgggcacacagagacacagttcggatcgacgcagtgcatacactgtttcttaatgtacgcgtagccgttctcctcctggtctttgttgacccctgtgccgctggtccacacctgaatgatgttattggtatacggcgacagtttgtcgttgttcgaccaggtctgttccccttgcgggttacgttcagggaaattgatatcctgacacttggtgacgcaagcctggcagcctacgcacaaggtcgagtcgtacaacatccccagcgatcccggaattggcgggcggttttcagcagccgcatgactgacagacggcagcgcgcccgtcagcaatgccccgcaggaggctgctttaataaaattacgtctgttcacggttattctccccgtgagtcagcgttatctttcttttgctgacgacccagttcacgcaccgccatcacgctgacaccggcaaccaacccaaccacaccgccgagcaaaccaatagcgcctgcagagacgttgccgccctctttagcgttaacatccggtttctgtgaacgcggagtttgattttcgacgttggcaagctgatggatgcctttatggaagccgataccttcttcgttacagccatagcaagggtgaccaatcgccaccggccacacaccgccaacatcgcagaattgcagcgttgagcagttgccgtaagtttctggccctttacagccgaggtggtacaggcaccagccttcgcggtggccttcatcaccgaactctttggcaaaacgaccagcatcgaagtgcgggcgacgttcgcagtgttcgtgaatcagacggccataggcgaaggtcggacggtttttgtcatccagtttcggcggtttgccgtaagtgatgatgtgcgcaacggtcgcgaggaagttgtgcgggttcggcgggcagcccggaatattgataacggttttgcctggcagaacttcttgcaggctgactgcgccagttgggttaactccagctgcggcaacaccgccccacgcagagcaggaaccgatagcgataatggctgctgcgccttccgccgctttgcggatgtgatccacaatcggctcaccggcaaccatgcaataaataccgttatcttttaatgggatggaaccatccaccactaacacatactgccctttgtacttctcgagagcgttatgtttgttctcttcgacctgatgaccgaaggcggcggaaagcacttcgtgatactccagagagatagtctccagtacgaggttttctaccgttggatgcgttgcacgaagcagagattccgtacaaccggtgcactcctgcgcgccaatccagataactggcggacgctgcgggttagtaaccgattcggccatctctgcagcggctttgctacttaaccccatggtggcggctaatgctgcacaaagcttcatgaaatcacgacggttaatgccgtgagaatggatgagggtgttatctccagtcatttatagttattccgttgcgaagacctggcatatattttgcctcaatcgcaaaatcaataatgcgatcgatgcgccatttaccacacatttattatggttatcgatatcatgatactgcggcggggcgctaaaacgaagggaagaagcattagtgtaattaattaaagcaagataatacgtatgtttgatcaattttcgaggcgataaccggccataaaaaagcgcaacgtagaacaggaattattctcacgaaagaaatccattaccatctctttatccagtccatagcggcgcgtcagaatacccgcttcccaggcgctaagctggcgatctccggtcttttcgtacatccggtgtgagtagcctaatacaaaaccgcgtttataatcggcacagaattttgtcacattaaccgcactgtcggcatgcgttgcttttaatcccgccattaagcctttaccaaaatggttattcatcgttcacctcattcgctatatattgtcatatatagcgatattttaggcaaagaacgacttttgcgcacgctattttttcatgcttgtttaagacgtaatcccgtaagagataaacctatcaggagagatatttatcgaaccatttcagtgtcctttgccaggcaagatcggcggcagatttgtcataacggggcgtggaatcattatggaatccgtgattaacccccggatagatatacgcctcataaaccttattattggctttcaacgccgcctcgtaagcaggccagccctcgttgattcgggtgtccagttccgcgaagtggagtagtaaaggcgcttcaatcttcgccacatcggcagtgggtgcctgacgaccataaaacggcaccgcgcaggccagttccggatacgcgacagccgccgcgttcgatacgccaccgccatagcaaaatccggtaatacccactttgcctgtcgcttgcggatagcgttgcataaactcaattgcggcaaagaaatcattcatcagtttgttggatcaacctgctgttgcagctcacgacctttatcatcatttcccggataacctccaacggaacttaagccgtcaggtgccagggcgatataccccgccttcgccactcgccgtgccacatcttcgatatacggattcagtccacgattctcatgcaccaccactacggctggcgttttgccgctcatctttgcgggcttcaccagataaccccgcacctcgccgtgaccatttggcgaaggatacgtgatgtactcagcaacaatttccgggtcggtaaactctacctgagtcgccagcgcataatttggcttgagcaaatcaaacaacgctaatgccgtcatcccgcctaccgcacttcgccgcaaggttgaggaactcacgtttcgagattttcccgtgagcgtaatagtcatagtaatccagcaactcttgtgggaaatctttggcggttaaacgcggcatcgttgcactcctcagttggtgtttttttaagcaaagcataagcacgtatttttgcccagtttttcgtcactctgtgagccagactacgggatacgcgctggcgaatcgctaaactagaaacattgtttcgaaattgaacggtggaaaggagaggtcatggtctggttagcgaatcccgaacgttacgggcagatgcaataccgctattgcggaaaaagtggtttacgcctgcccgcgttatcgctcggtttatggcacaatttcggtcacgttaacgcgctggaatcacagcgtgcgatcctgcgtaaagcgtttgatttgggcattacgcactttgatttagccaacaattacgggccgcctccaggaagcgcagaagagaactttggtcgcctgctgcgggaggattttgccgcttatcgcgatgaactgattatctctaccaaggctggctacgatatgtggcccggcccttacggctctggcggttcacgtaaatacctgctcgccagcctcgaccaaagcctgaagcgtatggggcttgagtatgtcgatatcttttactctcatcgcgtcgatgaaaatacgccgatggaagaaaccgcctctgcgctggctcatgcggtacaaagcggtaaggcgctgtatgtcgggatctcctcttactcgccagagcggacgcaaaaaatggtcgagttgctgcgcgagtggaaaattccgctgttaattcatcaaccttcgtacaatttactgaaccgctgggtggataaaagcggcctgctggataccctgcaaaataacggcgtgggctgtattgcctttactcctctggctcagggattgctgaccggaaaatatctcaacggcattccgcaagattcacggatgcatcgtgaagggaataaagttcgtggtctgacaccgaaaatgcttaccgaagccaacctcaacagcctgcgcttattgaatgaaatggcacagcagcgtggacaatcaatggcgcaaatggcgttaagctggttgctgaaagatgatcgcgtgacgtcggtattgattggtgccagccgcgcggagcaactagaggagaacgtgcaggcgctgaataatctgacatttagcaccaaggagctggcgcagattgatcagcatatcgccgatggcgagctgaatctgtggcaggcgtcttccgataaatgacctgttaataacgggcgcgcgaaccgcgcccgaatcagatcagtgattatgacgagtcagtcggtcaagatagcccatcacaaatgcagaaagcacaaacgtcagatggataatgacgtaccacatcagtttgttatccgggacatttttcgcatccataaagacgcgcagtaagtgaatggaagaaattgccacaatcgacgctgctactttgtttttcagcgacgttgcgtccattttccccagccagttcagcttctctttgttctcggagatatccagctgtgagacgaaattctcataaccggaaaacatcaccatcaccagcaaaccgccaaccagcgtcatatccaccagcgacagcaacacgaggatcaaatctgattccgccatcgagaagatattcggcagtacgtgaataatctcctggaagaacttcagcgccagggcaactaacgccagcgaaaggccaaagtacacgggggcaagcagccagcgagaagcatacattgcattttcaagaaaacgttccatacattcctgtcgtgtagttaaaacgggcaacagtatatcgcaattgagtaaacagcacgcaacagcaaatcaacatatacgttaaacctttgtcgcataattctgaggtttagggatcttcctggttcccttatcaacgcatcgagaacgtctacccttaaaggacgttgaacctgaagggagaaaaacgatgtctcatttaaaagacccgaccacgcagtattacactggtgaatatcccaaacagaaacaaccgacgccaggcatccaggcgaagatgacaccggtaccggattgcggcgagaaaacctatgttggtagcggtcgcctgaaagatcgtaaagcactggtgacagggggcgattccggaataggtcgcgctgccgccatcgcttacgcgcgtgaaggggctgacgtggcgatcagttatcttcccgtggaagaagaagacgctcaggatgtgaaaaagatcattgaagaatgcggacgcaaagccgttctgctgccaggcgatttaagcgatgagaaatttgcccgttcgctggttcacgaagcgcacaaggcgttaggcgggctggatattatggcgctggtcgccgggaaacaggttgccattccggatattgcagacctcaccagcgaacagtttcaaaagacctttgccattaacgttttcgcgctgttctggctaacccaggaagcgatccccctgctaccgaaaggtgcaagtatcatcaccacttcgtcaatccaggcataccagccaagtccgcatttactggactatgcggctacgaaggcggcgattctgaactacagccgtggcttggcaaaacaggtcgcggagaaaggtattcgggtgaatattgtcgcgccaggcccgatctggacagcactgcaaatttccggcggacaaacgcaggataagatcccgcagtttggtcagcaaacgccgatgaaacgtgcggggcaaccggcggaactggcccctgtatatgtttatctggcaagtcaggagtcgagctacgtcaccgcagaagtgcacggcgtgtgcggcggcgagcatttaggttaaaaaaatgcccggttgtgaaaagcaaccgggcatcattgtgaattcactcttacctgatgtggcgaaaacgccttatccgcctacaaacgcatgaagattcaacatgttgcaatagattttgtaggcctgataagcgtagcgcatcaggcattgagcacctaatgccggatgcgtcgtgaacgccttatccggcctacaaacgcacgaagattcaacatgttgcaatagattttgtaggcctgatgagcgtagcgcatcaggcaattctactttacttcgctttggcggtttcttcgccgaccagacctatcttcaggtaacccgcctgatgcagcgtatccattaccttcatcaacgtctcgtaatcgacggttttgtccgctcggaagaagatggtggtgtctttcttgccttcggttaacgcattcaacgccgtaatcattgtttcatcggtgaccggatcgttaccgataaacatcgagttgtctgccttcaccgacagataaaccggtttttccgggcgcggctgcggcgtgctggtagaagcaggcaagttcaccttcacatctaccgtcgctaacggtgccgccaccataaagataatcagcagaaccaacatcacgtcgataaacggcgtcacgttgatatcatgcatttcgccgttatcgtcgaggttttcgttaagatgcattgccatcggatattatcctgcgcgtaatttttgtgcgacacgaaccggatgcgcagcggcgctggcttccagatccaggtcacggctttgcagcaacaatacctgcgctgcaacatcacccagcatcgctttaaagccgccaatctggcgtgcaaatacgttatagataacgaccgcaggaatcgctgccacgaggccgattgccgttgctaacagagcttctgcgatacccggcgcaacgactgccaggttagtggtctgcgtttgcgcgataccaataaagctgttcatgatgccccagaccgtaccaaacagaccaacgaacggagaaatcgcgccgatggttgccagatagccgttaccgcggcccatttgacgacccactgcggcgacccgacgctccagacggaagctggtacgttctttaataccttcgttatcgtcgctgccttctgacagttccagctcattctgcgcttcattgagcaaatgcaggcttaagcttttgctaccaaaatcagcggcgatatcgttggcctggtttaaggaacgcgcttcagccagcagttgctgctcgcgcttaaggcgacgcttctgattgaagaactctacgctcttactgaagaagattgcccaggtgactacggaggccaaaataagcccaatcatcacgcacttaacgacaatatcggcgtgctgatacataccccagacggaaaggtccgtctgcattaaattattacccactgtgtatctccaggacgcaagtcacaaaatctgcgcataataatatcaaaacgacgtcgaattgatagtcgttctcattactatttgcatactgccgtacctttgctttcttttccttgcgtttacgcagtaaaaaagtcaccagcacgccatttgcgaaaattttctgctttatgccaattcttcaggatgcgcccgcgaatattcatgctagtttagacatccagacgtataaaaacaggaatcccgacatggcggacaaaaagcttgatactcaactggtgaatgcaggacgcagcaaaaaatacactctcggcgcggtaaatagcgtgattcagcgcgcttcttcgctggtctttgacagtgtagaagccaaaaaacacgcgacacgtaatcgcgccaatggagagttgttctatggacggcgcggaacgttaacccatttctccttacaacaagcgatgtgtgaactggaaggtggcgcaggctgcgtgctatttccctgcggggcggcagcggttgctaattccattcttgcttttatcgaacagggcgatcatgtgttgatgaccaacaccgcctatgaaccgagtcaggatttctgtagcaaaatcctcagcaaactgggcgtaacgacatcatggtttgatccgctgattggtgccgatatcgttaagcatctgcagccaaacactaaaatcgtgtttctggaatcgccaggctccatcaccatggaagtccacgacgttccggcgattgttgccgccgtacgcagtgtggtgccggatgccatcattatgatcgacaacacctgggcagccggtgtgctgtttaaggcgctggattttggcatcgatgtttctattcaagccgccaccaaatatctggttgggcattcagatgcgatgattggcactgccgtgtgcaatgcccgttgctgggagcagctacgggaaaatgcctatctgatgggccagatggtcgatgccgataccgcctatataaccagccgtggcctgcgcacattaggtgtgcgtttgcgtcaacatcatgaaagcagtctgaaagtggctgaatggctggcagaacatccgcaagttgcgcgagttaaccaccctgctctgcctggcagtaaaggtcacgaattctggaaacgagactttacaggcagcagcgggctattttcctttgtgcttaagaaaaaactcaataatgaagagctggcgaactatctggataacttcagtttattcagcatggcctactcgtggggcgggtatgaatcgttgatcctggcaaatcaaccagaacatatcgccgccattcgcccacaaggcgagatcgattttagcgggaccttgattcgcctgcatattggtctggaagatgtcgacgatctgattgccgatctggacgccggttttgcgcgaattgtataacattgccacttttggacaattttgcagacattttattgtgaaaagtcttaaattgttgcgtccgggatcaaggcgtcccggacgattcaggagtacaataggcagataaaggcttaaacgctgttccacaggaaagtccatggctgttattcaagatatcatcgctgcgctctggcaacacgactttgccgcgctggcggatcctcatattgttagcgttgtttactttgtcatgtttgccacgctgtttttagaaaacggcctgctgcccgcctcatttttgccaggcgacagcttgttgatactggcaggcgcattgattgcccagggggttatggattttctgcctacgattgcgattctgaccgccgcagcaagtctgggctgctggctaagttatattcaggggcgctggttagggaataccaaaacggtgaaaggctggctggcacagcttcctgctaaatatcaccagcgcgccacctgcatgtttgaccgccacggtctgctggcgctgctggctggacgttttcttgcatttgtccgtacgctgctgccaaccatggcgggaatttccggtctgccaaaccgccgcttccagtttttcaactggttaagtggattgctgtgggtcagcgtggtaaccagttttggctatgccttaagtatgattccgttcgttaaacgccatgaagatcaggtaatgacgttcctgatgatcctgccaattgccttgttaaccgctggcttgttaggcacgctgtttgtggtgattaaaaaaaaatactgtaacgcctgacgattttccccgttcccggttgctgtaccgggaacgtatttaattcccctgcatcgcccgcattcttgccgcatcttcccccggcgtcacaccgaagtaacgtttaaactcacggctaaattgcgatgcgctttcatagccgacgcgcatcgctgctgcgctggccttcatgccgtcatggatgatcatcatccgcgccttatgcagacggtaattcttcaaatactgcaacggcgaggtactggtgacagacttaaaattatggtggaacgccgatacgctcatgttggcttctgccgccagttgctcgacgctcaggttttcggtgtatttattctcaatccgtttcagcacgcggctaatcagactgaagtgagtctggcgactgaccagcgccagtaacgcgccgccgcaaggtccggtcagcacgtagtacagaatttcgcggatgatctgtttgccgagaatacgcgcatccagtggtcgctccatcacgtcgagtaaccgctccgccgcgcataaaatctcttctgataacgtggcggagttaatcccgctggctgccatcgacggctggaaatgctcatcttcgccaatgtccatcaacagttcctgtaactgcaaaatatcgacattgagacgcaaccctgccagcggcacctctgacgtggcataggtttcgcactcaaacggcaacggcaccgtcagcagcaggtattcattggcatcataacgaaacacgcgttcattgatataaccgattttatgcccggaaaagagaattatgatgccaggctcgtacatcaccggtgtacgtgcgaaaggcgtctcgccatacaacaaacgcacatcgggcaacagtcctgacaaactattttctttatttttcagtttattaactttatccgccagcaagcggcaaatctcttcacgtttcatatcgcgtaatttcttaggaataatgcggcaatttgattgtgcgcaattttgtagcatttctccagcactctggagaaataggcaagacattggcagaaatgagcattgagagccagggcgctggcgatcacaatgaaaaacatcaggcagatcgttctctgccctcatattggcccagcaaagggagcaagtaatgaacaactttaatctgcacaccccaacccgcattctgtttggtaaaggcgcaatcgctggtttacgcgaacaaattcctcacgatgctcgcgtattgattacctacggcggcggcagcgtgaaaaaaaccggcgttctcgatcaagttctggatgccctgaaaggcatggacgtgctggaatttggcggtattgagccaaacccggcttatgaaacgctgatgaacgccgtgaaactggttcgcgaacagaaagtgactttcctgctggcggttggcggcggttctgtactggacggcaccaaatttatcgccgcagcggctaactatccggaaaatatcgatccgtggcacattctgcaaacgggcggtaaagagattaaaagcgccatcccgatgggctgtgtgctgacgctgccagcaaccggttcagaatccaacgcaggcgcggtgatctcccgtaaaaccacaggcgacaagcaggcgttccattctgcccatgttcagccggtatttgccgtgctcgatccggtttatacctacaccctgccgccgcgtcaggtggctaacggcgtagtggacgcctttgtacacaccgtggaacagtatgttaccaaaccggttgatgccaaaattcaggaccgtttcgcagaaggcattttgctgacgctaatcgaagatggtccgaaagccctgaaagagccagaaaactacgatgtgcgcgccaacgtcatgtgggcggcgactcaggcgctgaacggtttgattggcgctggcgtaccgcaggactgggcaacgcatatgctgggccacgaactgactgcgatgcacggtctggatcacgcgcaaacactggctatcgtcctgcctgcactgtggaatgaaaaacgcgataccaagcgcgctaagctgctgcaatatgctgaacgcgtctggaacatcactgaaggttccgatgatgagcgtattgacgccgcgattgccgcaacccgcaatttctttgagcaattaggcgtgccgacccacctctccgactacggtctggacggcagctccatcccggctttgctgaaaaaactggaagagcacggcatgacccaactgggcgaaaatcatgacattacgttggatgtcagccgccgtatatacgaagccgcccgctaagctttttacgcctcaaactttcgttttcgggcatttcgtccagacttaagttcacaacacctcaccggagcctgctccggtgagttcatataaaggaggaacgtatggctaatccaaccgttattaagctacaggatggcaatgtcatgccccagctgggactgggcgtctggcaagcaagtaatgaggaagtaatcaccgccattcaaaaagcgttagaagtgggttatcgctcgattgataccgccgcggcctacaagaacgaagaaggtgtcggcaaagccctgaaaaatgcctcagtcaacagagaagaactgttcatcaccactaagctgtggaacgacgaccacaagcgcccccgcgaagccctgctcgacagcctgaaaaaactccagcttgattatatcgacctctacttaatgcactggcccgttcccgctatcgaccattatgtcgaagcatggaaaggcatgatcgaattgcaaaaagagggattaatcaaaagcatcggcgtgtgcaacttccagatccatcacctgcaacgcctgattgatgaaactggcgtgacgcctgtgataaaccagatcgaacttcatccgctgatgcaacaacgccagctacacgcctggaacgcgacacacaaaatccagaccgaatcctggagcccattagcgcaaggagggaaaggcgttttcgatcagaaagtcattcgcgatctggcagataaatacggcaaaaccccggcgcagattgttatccgctggcatctggatagcggcctggtggtgatcccgaaatcggtcacaccttcacgtattgccgaaaactttgatgtctgggatttccgtctcgacaaagacgaactcggcgaaattgcaaaactcgatcagggcaagcgtctcggtcccgatcctgaccagttcggcggctaacatgcaaattctcccggtggcggtaatgttccgctaccggacttttcagaaatcatttattcccctcgcgtcccgcccgttgttactcttccttgttcaggaatgccaaatataaggacatcatcatgcagagccggaagctcttaaaagaacaactcatctatatccgggataaacgcaacggagaggtgaaaaacagatgaaaataatacttctgtttttagcagccctggcaagttttaccgtacacgcacagcccccctcacagaccgtagaacaaacagtccggcatatttatcagaactataaatcagatgccactgccccttattttggtgaaaccggagagcgggcgataacttctgcgcgtattcaacaggcgcttaccctgaacgacaatcttacgctgccgggcaatattggctggctggattatgatccggtttgtgattgtcaggattttggcgatctggtgctagaaagcgttgcgataacccaaactgacgccgatcatgccgatgccgttgtgcgctttcgtatctttaaagatgataaagaaaagaccacgcagacactgaaaatggtggcggaaaatggtcgttgggtcattgacgatattgtcagcaatcatggcagcgtcttacaagcagttaatagcgagaatgaaaaaacgctggccgctttagcttcgttgcaaaaagaacagccggaagcctttgttgccgaactctttgaacatattgctgattatagctggccgtggacgtgggtggtttccgactcttaccgccaggcggttaatgccttctataaaaccaccttcaagacggccaataatcccgatgaagatatgcaaatagaacggcaatttatttacgacaatccgatctgttttggcgaagagtcgctattttcacgcgttgatgaaattcgagtcctggagaaaaccgccgattccgcccgcattcatgttcgttttacgctgaccaatggcaacaacgaagagcaagaactggttttacagcggcgcgaaggcaagtgggaaatcgctgattttatccgcccgaacagcggcagcctacttaagcagattgaggcaaaaactgccgccagattaaagcaatgagctgaattaaataacaattagccggaacaataaataaaagggaacactatatgaaaacgattttcaccgtgggagctgttgttctggcaacctgcttgctcagtggctgcgtcaatgagcaaaaggtcaatcagctggcgagcaatgtgcaaacattaaatgccaaaatcgcccggcttgagcaggatatgaaagcactacgcccacaaatctatgctgccaaatccgaagctaacagagccaatacgcgtcttgatgctcaggactattttgattgcctgcgctgcttgcgtatgtacgcagaatgataaaaaaatccccggtagcgtgtcagttgccggggatattttttaacgtccaaccgccgctttaggccgtttcttcgcaccagcattcaccggacgagattgcgtagacgacgctttttttgccgtagcaggcgtctgacgctgggtcgccatcggcgtatgtttcgtcaacgccggacgggtattgcggttctggcgacgagcttcacgcatctcttcaatggttggcgcaggcactaagcaatcgcgacggctgccaatcagatgctttttgcccatcgcttccagcgcctggcggattaacggccagtttgccggatcgtggtaacgcaacaacgctttatgcaaacgacgctgtttgtcgcccttcggtacgaagacgtcttcgctcttataaccaatcttcgccagcgggtttttcccggtgtaatacatggtggttgagttcgccagcggcgacggatagaagttctgcacctggtcgaggcggaagcggtgctttttcagccacagcgccagattcaccatatcttcatcacgcgtaccggggtgcgcggagatgaaataggggatcagatactgctctttacctgcctgttttgagtaagtatcgaacagctctttaaagcggtcatagctgcccatgcccggcttcatcatcttcgataacggcccttcttcggtatgttccggggcaatcttcagataaccgccgacgtgatgggtcgccagttctttgatatagcgcggatcttctacggctatgtcataacgcacaccagaggcaatcaggatctttttaatgcctttcagatcacgcgcacggcgatagaggttgatcgttggttcgtggttcgtgtccatgtgcggacaaatatccggataaacgcacgacaaacggcgacaagtttgttcagcgcgtggcgatttgcagcgcaacatatacatgttggcagttggcccaccaagatcggaaatcacgcccgtaaaacctggaacggtgtcgcggatcgcttcgatctcattaatgatcgaatcttcggaacggctctgaataatgcgcccttcgtgctcggtgatagaacagaaagagcagccgccaaagcagccacgcataatgttgaccgaaaaacggatcatttcgtaagccggaatacgggcattgccataggccggatgtggcacgcgcttgtatggcagcgcaaaaacgctgtccatctcttcggtagaaagcggaatagcaggcgggttgatccacacatagcggtcgccgtgtttttgcatcaatgcgcgggcacagcctgggttggtttcgtggtgcagaatacgcgaagcatgggcgtacagcactttatcgcccttcactttctcgaaagaaggcagcaacacgtaggttttttcccacggtttcgggcgcggtggctgcacggttacggctttggcttcctgctttttcggtgccaccggtttgttatccgcgcacggcaaatcttcaccatacggatgcgggattgggtcgatttttccaggggtatcaagacgggtggaatccacgccgctccagccaggcagcgcctctttcacgataatcgcggtattacgcacatcgcggatttcactaattggctcgcccatcgccagacgatgcgccacttccaccagcggacgctcaccgttaccaaacatcagcatgtcggctttcgaatccaccagcacggaacggcgcacggtatcggaccagtaatcataatgcgcggtacggcgcagactagcctcaataccgccgaggatcaccggtacatctttccacgcctctttacaacgctgggtataaaccagtgtggcgcgatccgggcgcttacccgcgacgttatccggcgtgtaggcatcgtcatgacgtaaacggcgatcggcggtataacggttgatcatcgaatccatgttgccagcagtaacaccgaaaaacagattcggtttacccagacgcataaagtcgtctttgctgctccagtccggctgggcgatgatcccgacgcgaaagccctgcgcttccagcatacgaccgcaaatcgccatcccgaagcttgggtgatcgacatacgcgtcgccagtaaccaaaatgatgtcgcagctatcccagccaagttgatccatctcttcacgagacatcggcaaaaacggtgccggtccaaaacaggcggcccagtactgcggccaggagaacaggtcgcgatccggttggatcagggagatagagctcattttgcttccagaaatgataaaaaaataatcaaaggccggggattataagccggaacgaaagagaaatcgaaaggtattccatactcgccctcctcgggcgagtatgaagattacggtaccggattgaccaacagttgcccaatcgagccacggtccgccatttccagcgtctgactgttgaagtagaacgggaagtgcgcccaggaaggctgaccgaaataaacaagcagctccacttgtccgtcaacccaaacggtatctttccagcctctgtcttccgggaacggcatcgcgccattcacgttacggatctggaacattacgccttcaatatggaacgcttgcggctcgtccgcgcgtaccgtccagcgttcccacgttccttgctgcgcggtgacatcaatacggttgacgtcccacagctgtccattaatacccgggtcatcacccagactgatatcgcgactgcgaattggcgaaccagccatgatttcagttggcagcaagcgcatcggaagactgtctgtgaccagcggcagaaggccggttgggcgcagcgttagcaccagggtagaaaccagaatactggatggctcaaagaagccacgaatacgatcaacaatgctcgccgcttcgccacaggtgatcgacacttcatcgccgttgctcatatccaccagaatctcgcggcgctcgcccggtgccagcgaaagttgcttcaccgatacaggagcaggcaggaatccctgatcgccagaaatcacatgtaacgggcgaccatcgttcatctgtagttgatagcgacgagagttcgacgcgttcagcagtcgcaagcgcacccagccacgcgagacttcaacgtacgggctttgtacaccgttaaccagcagcgtatcaccaacaaagccgccgcttcccggttcgttgtattctggcgtaccaaagttatccagccgtttatcctggataatgaccggaaaatcatccacaccataatggttggggataggcagcgacttgctgacttcatcttccaccagccacattccggcaaggccgttatagacctgctgagccgtgcggttgggagtattggcgtgataccacagagtagctgcgttctggcgaatgggcagtacgggtgcccagtcagcgtttggcgacatcatccgtgccggaccgcccatcagcgggcctggtacctgtagcccggccaccgtcattgagacattttctgtcaggcggttgctgtaaataagcttaacatcgtcgcccttccagacgcggatagtcggccccaggtaacgaccattgattccccagaccgacgcgcgtgtccctggcgtaaatgaccagtgcgcacgttgtacagtcataaacagcggttgcccacggcgagattcaagtagcggcggaacgggtagcggttgctgttgcccggctgcgctggccttcaggggaacagcgcctgcacaaagtgcaatccccgatgcctgaatgaactgacgccgactgagtgacatatttgctccatgtaaaactggctaaagtaataccgtgcaggaaagtgttccccgcaaaaatacagattgccgacttaaacttttccggcggcttcgcgttctgcgacttctttatcgagctcggcgattttttgttccattatcgaacgacaatgggcagccagctcacgaacctgatctttgccatactgactgacgtcaattggcggcagcatttcgacaatcaccagaccgttgtgcagtcgattaagattaatcttattcgaagttgtagagacgcacacgggaataatcgggacgcccgccgcaattgccgcgtgaaatgctccagtcttgaacggtagcaggccgcgaccacggctgcgggttccttccgggaacatccagatggaaatacggcgttttttgaagtgattcactacttccgcaatggtgccgtgagctttagtgcgattgtttctgtcgatcaataagttgccggttaaccagtacaactgcccgaagaaggggatccacagcaagctctttttacctaccgtcaccgtcggcggttgcacgatgttcgatgctgtcaccatgtcatagttgttctggtggttagcgatatagatagcattgccgtagctttcagcgtctgtaggtttacggcactcaactttcaggccaaacagcggcgcaagacggccaaacatatgcccaaaggtggccacatgtttcgggttacgcgggctgaaaaggcagtaaatggagccgaatacacagactaagatgctgtaaatcacggtaataataagacgaaagatatatagcataacaccctctgaaggtctgagagactggcattgtacgtcacctgaaatcaggttagggcattgttaaaagccgctctctggaaaagcgtattgttaatcgcaacgcatgaataaacaacggtttcaagggaatttttatcgtttccgggggttgaatacgctgccggatgacgacttaacgtttcatccggcgttccttgcaagcgggaggaaacagcgccctccccggcatattactcttcgctatcaccgctgctggcacggcgaggagagtcgatctcaacacgatcgatacgctgcaaaccgcgcatcaacgtaccgcggcgtccacgttcgccagtgactttctgtaactcttccgggcgcagtttaattttgcgtttcccaacatgaatggtcagcgtgctttgcggcggcagaacgtacaattgcgccagaccatcttctccacgcgcggcttctgccgatggaatgttgataatcttgttgcctttgcccttcgacagctgcggcagatcacttaccgggaacatcaacatacggcctgcctgagtgattgccagcagcatatcggaagcatcttcaatcaccaccggcggcataacatgggcattttccggtaaggtgatcaaagccttacctgcacggttacgcgccaccagatcgttaaaggtgcagacgaaaccgtaacccgcatcggaagccatcagcagtttctgatcgtcgctttccatcagcatatggtcaacggtcgccccaggcggcaacgttaatttgccggtgagcggctcgccctgaccacgcgccgacggcagcgtaatcgggtcaatggcatagctacgaccggtggaatcaacaaacactaccggttggttgctcttacctttcaccgccgctttgaagctatcacccgctttataattcaggcccggcgcgtcgatatcatggcctttagcgctgcgtacccagcccatctgcgacagcacaatggtgacaggttcagacggcagcatgtcgtgctcgctcatcgctttcgcttcttcgcgttcctgcaacggcgaacgacgatcgtcaccgtaggcttgcgcgtctgcctgcagttctttcttcagcaggttattcattttacgctcggaagccaaaatgccctgcaactggtcgcgctctttttccagttcactctgctcaccgcgaatcttcatctcttccagtttggcaagatgacgcagtttcagttcgaggatcgcttccgcctgggtttccgtaaggccaaaccgcgacatcagcgccggtttcggttcatcttcattacgaatgatctcaatcacttcgtcgatattgagaaacgccaccagcaaaccttcgaggatatgcaggcgcttgaggactttctccagacgatagttcagtcggcggcgcacggtatcgcggcggaacaccagccattcggagaggatttccagcaggtttttcaccgccggacgaccatccagaccgatcatattaaggttaatacgatagctcttttccagatcggtggtagcgaagaggtggttcatcacctgatccatatccacgcggttggaacgcggcacaatcaccaggcgggtcgggttctcgtggtcagattcatcgcgcagatcgtcaaccatcggcagctttttgttgcgcatttgcgcagcaatttgctccagtacgcgcgcacctgaaacctgatgcggcaatgcgctgataaccaccgcgccatcttctttcttccacaccgcgcgcatacgcactgaaccacgtccgttctcgtagattttacggatctcggcgcgcgaagtgataatttccgcttcagtcggataatccggcccctgcacgatatccagcagctgatcgagcgtggttttcggctggtcgattaatgcgattgccgcctgagccacttcacgcaggttatgcggtggaatatcggtcgccatgccgacggcaataccggtggtgccgttaagcaaaatgtttggcagacgggcaggtagcattttcggctcctgcaaagtgccgtcgaagtttggcacccagtcagccgtcccctgccccagctcgctcaatagcagctcggaatatttcgacaaccgggattcggtgtaacgcattgccgcgaacgatttcggatcgtccggcgcgccccagttcccctgaccatcaaccagcggataacggtaagagaacggttgcgccatcaggaccatcgcttcataacaggcgctatcgccgtgcggatggtatttacccagtacgtcaccgacggtacgggccgattttttaaatttggcgctggcattcaggcccagttcagacatcgcatacacaatgcggcgctgaacaggtttcagaccatcaccaataaacggcaacgcacggtccatgatcacgtacatggagtagtttaagtaggcgttttccgtaaattcatgtagcgcaaggcgctctgccatatcgctcattaattctgattcctcaacttattcgccagccttcaaaggggcaatattgccggagatactacattatctgccgcgtcgagtcacaggagatcaacgtgaatagcgccgccggacgtgctccgacggcgataaaggcatcaatgtgccttgatatacaactctttgctgtagacataatcctggggattatgcagcggaaaaccgccaacgtagggtttaagcagtttgattaacggctgatagtagataggaatcagcggtgcctgttggttgatgatcacttctgcctgctgatacaacgcattacgctttgtcgcatcagtgatctgcgtggcctggtttagtaaggcgtcatactgcgcatttttccagtgaccgacgttttcttcactatcgcttttgagcgtgttcaggaagctggaagcatcattgtacgtcgcatcccacgactgccgagacagcatgaaatcaccggctcgtcgggcatcaagataggttttccactccattgtgcgcagcgtcacctgtgcacccagccattttttccattcggaagacaacgctatcgcggtcttttcatgcagatcgtacttgttgtagaacagctcaaagcgtagcggatgagaggcgtcgtatcccgcctgtttcagcaaggcttttgccatcgcgacgcgctcactcattggcttttgcagttcatcgaacgtcgtcgcgctaaagccttttacctctggcggcgtcagcgtggttgcgggcgttctcaaccccagtaccttttgcgcaataagctgtcgatcaaccgtaagatatagcgcccgacgcactcgcacatcgttaaatggcggtttctcaaggttgaagttgtaatattcgctgttcagacgcggaataattcgtagctcgccaggcagtgatttttcaatggcgggaatttgctgcgccggaacccaggtgagatcgacctctcccgcgcgatagcggttatagccggtgaccgaattatctagcgccagatactcaacctgttgcaatactgtatgttgcgcatcgcggtactttggatttttgcgtgcagtaatcttttcgttaactacccactgatcaagcacaaaggcaccgttgtaaaccatgttctctggcttactccagctatcgccatgtttagcgatgacatgatgaggaaccgggaacagcgtcggccaggcgagcatcgtcgtgaaccaaggaaccggctgctcaagcgtaacttcaagagtacgatcatccgtcgctttgacacccagcgatgtaacatctgctttacccgcaacaatagctgcggcattgttaatgtgcgcctgtgccagatagccagcaaaagggcttgccgttttcgggtcaaccgcgcgctgccagccgaggacaaaatcctctgccgtcagaggctgaccgtcggaccactgcaaaccgctacgcagatggaaaatatagcgcttgccgccgtccagtatctcccagcgttcagcctgagcgggctgcacctggccttcaccgtccatccataccagaccttcaaacagatccagcacaatctgcgcggcagtattctcctccaccttttgcgggtcgagcgtacctgggtcgctatgattgttgtaacgaaagacttgttgcggggcgagcggtgtgttggcgggaacgtcagcagcgtagagaggagccgcacttaccaggctgaccagccataataaatttcgcgtatacatggtattccttaccggagaaattataagcccaacaacaatacgcctgtggcattgttcgctcaaacttatcgcgagtgatttggctcacactccggtaaagaaaaaagcgagttgcccccgcttttccattaattaacggatttcattcaatagttctggatgcttatccagaacacgtaaaagtttgattgtggaaggatgaggttgggcattgcctttttcgtaacgcgaaaacgcatttacacctcccccaaaaatttcgcttgcctctttttgggtaagagagagcttttttcgaaccttcactataaattcaggtgccactgtttcggcattcaccgaagcccgaaatgcctttacttgcgccatgaaagcatctgactcttctttattcatgatgctctcttcgcaatggacacaatataaaccgtggatacctttcaatactgtttttcgtccacggaaggtgtatggaatatctttaatgccagaaaccatttctccctggtggcaaaccggacatttcatattacttctccttaaacgagacgatcagtacgtcatgaattaccgtaattttaagataaacctggcctgtaacaagcctgggtctgtaaacatcctgccagatagtatgatcagagtaggtggtcatgcttttataaaagtcgctctctgataatccaatgataacattacacataccatcaaaatccaaacctaactcatctgcatttaacagggcactacgtgttgtacgaacttgcccggcattgacaagttttttaacctgactcaaacgtgtatgtggtgtgcgtttttccataacccccgcctccctgttactttagttataacctaaaaggttaattacagcaatgaaaaagcacctaaaaggttagttagatgtacggagatagtgaccacacaaaacgtattctttaaggaaagtgattgaccatataagaaagtggcgcattagtagcgccagtttgaagcaggaatttataagggaagctggagtcaggcatcacgccaacggcacataaacatccgtttccagtcgctgctctgtcaccccttcggcaagattggtgtagtgaaacagaatcggtgctttacgcattttctcgccgcttgcaggcagccagtggcgaatgatgccccataccgtgtgtgaaatatcgtccagctcgccaacgtggcgggccacggcataacgtccaccggtaagttcaccattgctcacaccataacgattatcgggaatcggttcgctaacgctgccgcagatatcaaagcgaaacgcttccggtgcggtggtggcagggtcgtcccaggcgacgccaaaagtctggctttggttaacaggagaaagccccgtctctttacgccacatgataaatttcgccacgctgtagttgagcaattcagggctacagcggtgcggcaacatcgccacaggtattgatgggaaatcgataatgtttacatccagtgtcaggtttgtcattttgcctccctgcgaaattattcccgggaacgcgtcccgggagcggtaacaattacggatttactttgcggatctgtttgacgtcaatttcaacagaattccagtctttatcgacttcaccctgaatctcaaccgtatctttcggcgtcaccgtcacgccgttccagcgtttgtggtcgatatcaacattgatagtaccgctggcatctttgaacacgtagagatcgtcagagatgcgttcaacgatattgccgcgcagggttacccaggtgtcgtcacgcagggattttgcgctttctacagtcgttacgctgccgttcggcccctggaatcctccggcctgactttgcgttgccgatgggccagaaaaaccgccctgctctgctgccatcaccggtgcgctgcacagggccattactgcgattactgctgcgaattttttcatgtttattactccctttaatgtctgtttccgagcatttaacaagatagtccttaacaacttcttaagggaaaaaaataaaatttagtgctgtacagagcgcgttacaacacggtttactggcagcaaatacggttatcgcagggatgaaaaaatgcgaattttactgatagaagatgacatgctgattggcgacggcatcaaaacgggccttagtaaaatgggttttagcgtcgactggtttacacaaggtcgtcagggaaaagaggcgctttatagcgcaccttatgatgcggtgatcctggatttaaccttaccaggcatggatggtcgcgatattttgcgcgaatggcgagaaaaaggtcagcgtgagccggtactgatcctgaccgcgcgcgatgcgctggcggaacgtgtagaagggctgcgtctgggagctgacgattatctgtgtaaaccttttgcgttgatagaagtcgccgccaggctggaagctctgatgcgccgaaccaacggccaggccagcaacgagctgcgccacggtaacgtcatgctcgaccccggcaaacgtatcgccacgctggctggcgaacccttaacactgaaaccaaaagaatttgccctgctggaattactgatgcgtaacgctggtcgggtactgtcgcgcaaactgattgaagagaaactgtatacctgggacgaagaggtcaccagtaatgccgttgaagtgcatgtgcatcatctgcgacgcaaactcggtagtgattttattcgtaccgtgcatggtattggttacacattaggtgagaaatgaaatttacccaacgtcttagtctgcgcgtcaggctgacgctaatctttttaattctggcctcggtgacctggctgctttccagctttgtcgcctggaaacaaacaacggataacgtcgatgaattgttcgacacccaactgatgctgtttgccaagcggttaagtacgctcgatctcaacgaaatcaacgcggcggatcgcatggcacagacgccaaatagattaaaacacggtcatgttgatgacgatgcgctgacctttgccatctttacccacgacggcagaatggtccttaatgatggcgataacggagaagatattccctatagctatcaacgggaaggttttgctgacgggcaactggtcggtgaagacgatccttggcgttttgtctggatgacctcacctgatggcaaatatcgcatcgttgttggccaggaatgggaataccgtgaagacatggcgctggcgattgttgccgggcaattgatcccgtggctggtcgcactgccgattatgttaatcatcatgatggtactactgggtcgtgaactcgcgccgctgaacaaactggcgctggcactacgtatgcgtgaccctgactcggaaaaaccactaaacgcgactggcgtacccagcgaagtgcggccactggttgagtcgctaaatcaactgttcgcccgcacacatgcgatgatggttcgtgaacgacgctttacctccgacgcagctcacgaacttcgtagcccgttaacggcgctgaaagtgcaaaccgaagttgcgcagctctctgacgatgatccgcaggcgcggaaaaaagcactgctccaattacattccgggatcgatcgcgctactcgtctggttgatcaactgctcacgctatcgcggctggactcactggataaccttcaggacgtcgcggagatcccgcttgaagatctcctgcaatcgtcggtgatggatatttaccacacggcgcagcaggcgaaaattgacgtgcgactgacactcaatgcccacagcatcaaacgcaccgggcaaccgctattgctaagtttgttggtgcgaaatttgctggataacgccgtgcgctacagtccacagggcagcgtggtagacgtcacgctgaatgctgataatttcatcgtgagggataacggccccggtgtgacaccagaggcactggcgcgaattggcgaacgcttctatcgcccacccggacaaaccgctaccggcagcgggcttgggctatcgattgtccagcgaatcgccaaattgcatggcatgaatgttgaatttgggaatgcggaacaaggtggatttgaggcgaaggtaagctggtaacttctctgtctatgagagccgttaaaacgactctcatagattttactaatagcaaaatataaaccgtccccaaaaaagccaccaaccacaaaccagacaaataccgagcgagaatacatatacccaaaactcgaacatttcccgcataaagagttttcttaagataagaataataagtggcgtaagaagaaaaaatgctgcaatcattgcttgcaatatacgatcttcgcctgaaacggaaggtatactgcaaatatttcctcccgactcaagcatccagtcatacttattgaaagcaaaaaaagaatctattaaccaataagtaagcattatatatagcaatgcttcaaatattgttttaattttctgctttaacatatatcagtacgctcataaaaatccatttataattatcaacatgacacgttgatactttcatcttttacttattcaaagccatattttcaatccccaaaaaaaccgaaccaaacgtgtaaattattccggtgcgagtaagaattatgaggaatggctatcagtattgtcattttcagaaaatatttatcctgcatcggtgagtcagagtaagatcagacttttgctaaattcgcaaaagactttgcacattttgctaatttcaccgtaccgctctgtgacgtactatagtcggcaaacgtctcaccttgaggttaaaaaatgagcaacatcctgattatcaacggcgcgaaaaaattcgcccactccaatggtcaactgaacgacaccctgaccgaagtcgcggatggcacactgcgcgaccttgggcatgatgtccgcatcgttcgcgccgacagcgactacgatgtcaaagcggaagtacaaaactttctctgggctgatgtggtgatctggcagatgccaggctggtggatgggcgcgccgtggacagtgaaaaaatacattgatgatgtattcaccgaaggtcacgggacgctgtatgccagcgatggtcgtacccgcaaagatccgtcgaaaaaatacggttccggcggcctggtacagggcaaaaaatatatgctttctctgacctggaacgcaccaatggaagccttcaccgaaaaagatcagttcttccacggcgttggcgttgacggtgtgtatctgccgttccataaagcaaaccaattcctcggtatggaaccgctgccgacatttatcgctaatgacgtgataaaaatgcctgatgttccccgctatactgaagaatatcgcaagcatcttgtggaaatttttggttaactagagctcaggctttagaaggagttaaccatgcttaccgtaatcgcagaaatccgtactcgtcctggtcaacatcaccgtcaggcggtattggatcagtttgctaaaatcgttccaaccgtactgaaagaagaaggttgccacggctatgcgccaatggtggattgcgcagctggcgtgagtttccagtctatggcaccggattctatcgtgatgattgagcagtgggaaagcatcgcgcatcttgaagcgcatctgcaaaccccgcacatgaaggcgtatagcgaagccgtaaaaggtgacgtgctggagatgaatatccgtattctgcagccagggatttaatcctgccttgtttgcccggccatcctgaccgggcaatgttctttcctttaaacctcaatctccgccatgtcgcctttctcttgcaaccagttgcggcgatcttccgagcgtttcttcgccagcagcatatccatcatcgcgtcagtacgctgatcgtcttcatcatcgatagtcaactgcaccagacggcgagtgttcggatcaagcgtggtttcgcgcaattgcatcgggttcatttcccccagacctttaaaacgctggacgttcggcttgcctttcttgcgttttaattgctcaagtacgccctctttctcttcttccgtcagcgcgtaataaacctctttcccgagatcaatacggtagagcggtggcagtgcgacgtaaacgtgaccgtgtttcaccaacgcgcggaaatgttttacgaacaaagcgcagagcagcgtggcaatgtgcagaccatcagagtccgcatccgcgaggatacagattttgccataacgaagctggctcagatcgtcgctgtcaggatcgataccgatcgctaccgaaatatcgtgcacttcctgcgaagccagcacttcgtcggaagagacttcccaggtgttaaggatcttacctttcagtggcatgatcgcctgatattcgcgatcgcgcgcctgcttggcagatccgcctgcggagtcaccttccacaaggaacagctcggtacggttaaggtcctgcgcggtacaatcagccagtttgccaggcaacgccgggccgctggtcagctttttacgcaccacttttttggccgcacgcatacggcgctgggcgctggaaatcgccatctccgccagcagttcagccgcctgaacgttctggttcagccacaggataaaggcatctttcaccacgccagaaacgaatgccgcgcattgacgcgaagagagacgctctttcgtctgcccggcaaactgcggatcctgcatttttactgacagcacataggcgcagcgatcccagatatcttccgccgacagctttacaccgcgcggcagaatattgcggtattcacagaactcacgcatcgcgtccaacaggccctgacgcagaccattaacatgggtaccgccctgcatcgttgggataaggttgacgtagctttcggtcagcagttcaccgccttccggcagccacagtagcgcccagtccacagcttcagtatcaccagcgaaattaccgataaacggtttttccggcagcgtcggcagaccatttaccgcttccgccaggtaatcattcagaccgtcctgatagcaccagcgttgttcggtattgttgatctcatctttaaaagtgatctcaacgccagggcacaataccgctttggctttcagcacatgcgtcaggcgtgaaacagaaaatcgcgggctgtcaaagaaggtttcatccggccagaagtgcacactggtaccagtattgcgtttaccgcaagtgccgacaacctgtaaatcctgcaccttttcgccattttcaaaggcgatgttataaacctgaccatcgcggcgcacgttaacttctacgcgcttcgacagggcgttaaccaccgaaatccccacgccatgcaggccgccagagaactggtaatttttgttagagaatttaccgcctgcatgcagacggcaaagaatcagttcaaccgccggtacaccctcttccgggtgaatatccaccggcatcccgcgcccatcgtcaataacttctaacgactggtcagcatgtaaaataacgtccacgcgttttgcgtgacccgccagtgcttcatccacactgttatcaatgacttcttgccccaaatggttagggcgagtggtatcggtatacatccccggacggcggcgaaccggctcaagcccggtgagtacctcaatggcatcagcgttataagtttgcgtcatggtttaagttagtaattcgagttgatcgtcagagatggtgcagaccaagaaaatcgacgatcgggttgaaataatcttcgaagcccgtgaatgcgtggttgccgccttctatgacagtctggcggcaggaagcgtagtacgccaccgcctggcggtaatccagcacttcatctcccgtctgttgcagcagccagatcaaatccggcgcttccagcgggtcaatctgcatgactttaagatcgtaaatatggcgtgactctagcacatattgctgcccggtgtaggggttctcgttctgaccgagatagtccgtcagcagttcaaacgggcgcaccgccgggtttaccaccactgcgggcagcataaaacattgtgacaaccaggtggcgtaatatccccccagtgacgaaccgacaatacccagcgaatcaccgccatgttccaggacaatggattccagcagctctgccgcgtcggaaggatacggcggcaactgcggaatgatcatctcaacgtcagggtgatgttccgccagccagttttttaacaagctcgcttttgcagagcgcggcgagctgttgaaaccgtgtaaataaagaagcgtagacatcagtagccttctgaagcggtatcaggttggaaacgtgtgtccgccaggcgatgcacctcggtggtcagcgtgccatcagcatgtaactcgagagtacgccagccgggcgcgatggtatccagcgtaaagttggaacagtgcggcttaaactgcacacaggtcgacggcgttgccagcaggcggcgaccattccagtcgagatccagctcctgatgaatatgaccgcacagcaagtatttgacgtgcggaaacttcgccagcacggtatccagttcgcccgcgttacgcagactgtgttgatcgagccaactacaacccgcaggtagcggatgatgatgcagcagcagcaacgtatggcgttctggcgcatcggccagtttacgttccagccactcaagctgaaactcgctcagctcaccgtgcggcacgccaaacacctggctatccagcaacaggatttgccattgctcaccaataaacacgcgcttcgccggggagatacccgcatcctgtaacgcgctgtacatcgcgggctggaaatcgtggttgcccggcagccagacgcagggcgcacgaaaacttgcgatgccttcagcgaaatgctgataggccgcagaggattgatcctgcgctaaatcacctgtcgcgacaatcaggtcgaattcgtgctggtgtggccgaatcgcctccagcaccgcctggtaactctcccaggtgtttacccctaacagggcttcgtgcttttgtgcaaacaggtgagtgtcggtaatttgtaaaatcctgactctggcctcaccagccagaggaagggttaacaggctttccaaatggtgtccttaggtttcacgacgctaataaaccggaatcgccatcgctccatgtgctaaacagtatcgcaaccagtccgctaaaaactgattaatttgatgcttttcgtcgcgttgatgcaactttttattaggataatcataccgcgctttgaagcgaaaaatctgctggcttgaacacacttcagccaccatcgcgtcatgatacagacgcaccgtcattgacggaaggctccagtaactgatcgcgggcgcagtctgttctattgtcaccagggtagtgtatcgggtcgattccacaatcgtcagccgatattgtgcgtttgccacctgatagcttacagtttcgccgggtgcgtcattgcgcggtaacaaacggcgcaattgtgaaaagttcatctcgcacaggcgcatcatttcaggaaagtcaggtgtgtaacgcttcatttatgcccactcattttttaacgcttgatgatgcagctgcagccattgcaaagcgatgaccgacgctgcgttgtcgattttcccctcttctacccactggtatgcctgttcccggcttaccacatgaacgcgaatatcttcgttttcatcagccagaccgtgaataccgcttgcggtcgtggcgtccacttcgcccaccataattgacgaacgctcactggtgccccccgggcttgccaggaaacttaacaccggtttggtccgtttgactatcagtcccgcctcttcaatcgcttcgcgacgggcaacatcttccacactttcaccctcttcaatcatcccggcaaccatctccagtagccaaggggtttcgctggtgtcgtacgcggcaatccgaatctgctcaatcagcacaacttcatcacgcactgggtcaaagggtagcaagactgcggcgtgaccgcgctcaaaaatttcccgccgcacctcatgactcatttgcccgttgaatagacgatgacgaaatctataaagatctaatgaaaaaaagccgcgataaagtgtttctcgtgcaataatttctacatcgtttttgccaaatgtaacgggcaggttgtctggcttaagcattgttaatgtcctggcactaatagtgaattaaatgtgaatttcagcgacgtttgactgccgtttgagcagtcatgtgttaaattgaggcacattaacgccctatggcacgtaacgccaaccttttgcggtagcggcttctgctagaatccgcaataattttacagtttgatcgcgctaaatactgcttcaccacaaggaatgcaaatgaagaaattgctccccattcttatcggcctgagcctttctgggttcagttcgttgagccaggccgagaacctgatgcaagtttatcagcaagcacgccttagtaacccggaattgcgtaagtctgccgccgatcgtgatgctgcctttgaaaaaattaatgaagcgcgcagtccattactgccacagctaggtttaggtgcagattacacctatagcaacggctaccgcgacgcgaacggcatcaactctaacgcgaccagtgcgtccttgcagttaactcaatccatttttgatatgtcgaaatggcgtgcgttaacgctgcaggaaaaagcagcagggattcaggacgtcacgtatcagaccgatcagcaaaccttgatcctcaacaccgcgaccgcttatttcaacgtgttgaatgctattgacgttctttcctatacacaggcacaaaaagaagcgatctaccgtcaattagatcaaaccacccaacgttttaacgtgggcctggtagcgatcaccgacgtgcagaacgcccgcgcacagtacgataccgtgctggcgaacgaagtgaccgcacgtaataaccttgataacgcggtagagcagctgcgccagatcaccggtaactactatccggaactggctgcgctgaatgtcgaaaactttaaaaccgacaaaccacagccggttaacgcgctgctgaaagaagccgaaaaacgcaacctgtcgctgttacaggcacgcttgagccaggacctggcgcgcgagcaaattcgccaggcgcaggatggtcacttaccgactctggatttaacggcttctaccgggatttctgacacctcttatagcggttcgaaaacccgtggtgccgctggtacccagtatgacgatagcaatatgggccagaacaaagttggcctgagcttctcgctgccgatttatcagggcggaatggttaactcgcaggtgaaacaggcacagtacaactttgtcggtgccagcgagcaactggaaagtgcccatcgtagcgtcgtgcagaccgtgcgttcctccttcaacaacattaatgcatctatcagtagcattaacgcctacaaacaagccgtagtttccgctcaaagctcattagacgcgatggaagcgggctactcggtcggtacgcgtaccattgttgatgtgttggatgcgaccaccacgttgtacaacgccaagcaagagctggcgaatgcgcgttataactacctgattaatcagctgaatattaagtcagctctgggtacgttgaacgagcaggatctgctggcactgaacaatgcgctgagcaaaccggtttccactaatccggaaaacgttgcaccgcaaacgccggaacagaatgctattgctgatggttatgcgcctgatagcccggcaccagtcgttcagcaaacatccgcacgcactaccaccagtaacggtcataaccctttccgtaactgatgacgacgacggggcttcggccccgtctgaacgtaaggcaacgtaaagatacgggttatctgccgcattcttcccccttctcgcttcaatttcgaccagccatcctctattctgatgggtatttaccactggtcccggaagacaaaaatgaaacggacaaaatccatacgccacgcatcgttccgcaaaaactggagcgcacgccatctgacaccagtcgctctcgcggttgccactgtttttatgctggctggctgtgaaaagagtgatgaaacagtgtctctctatcaaaatgctgacgactgttcagctgcaaacccaggcaaaagcgccgaatgtaccaccgcgtacaacaatgcgctgaaagaagccgaacgtactgcgccgaaatacgccacccgtgaagactgtgttgctgaatttggtgaaggtcagtgccagcaggcaccagcccaggctggcatggcaccagaaaaccaggcgcaggcccagcaatccagcgggagtttctggatgccgctgatggccggttacatgatggggcgtctgatgggcggcggcgcgggatttgcacagcagccgctgttctcctcgaaaaacccagccagtccggcttacggtaaatataccgacgcgacgggtaaaaactatggcgcagcccagccaggccgcaccatgaccgtaccgaagacggcaatggcaccaaaaccggcgaccaccactaccgttacccgtggcggttttggtgaatctgttgccaaacaaagcactatgcagcgtagtgcaaccggtacctcttctcgttcaatgggtggctgataccgatggaaagagtcagtattaccgagcgcccggactggcgtgagaaagcccacgaatacggtttcaattttcacaccatgtacggcgagccgtactggtgtgaagatgcttactacaagttgaccctcgcccaggttgaaaagctggaagaagtcaccgccgaactgcaccagatgtgcctgaaagtggtggaaaaagtgatcgccagcgatgagctgatgaccaaattccgcattccaaaacacacctggagttttgtgcgccagtcatggctgacgcaccagccatcgctttattcgcgtcttgatctggcgtgggatggcactggtgaacctaaacttctggaaaataacgccgatacgccaacgtcactatacgaggcggcgttctttcagtggatctggctggaagatcagcttaacgccggtaacttgccggagggcagcgaccagtttaacagtctgcaagaaaaactgatcgatcgcttcgttgagctgcgtgaacagtatggcttccagttgctgcatctcacctgctgtcgcgacacggtggaagatcgcggaaccattcagtatttgcaggactgcgcaacggaagctgaaattgctactgagttcctctacatcgatgatatcgggttaggtgaaaaaggtcagttcacggatttacaggatcaggtaatttccaacctgttcaaactgtatccgtgggaatttatgttgcgtgagatgttctcaaccaagctggaggatgcaggcgtacgctggctggaaccggcgtggaagagcattatctccaacaaggcacttctaccgctactgtgggagatgttcccgaatcacccgaacctgctgcccgcttattttgcggaagatgatcatccgcaaatggaaaaatatgtggttaaaccgatcttctcccgtgaaggcgcaaacgtgtcgatcattgagaacggcaaaaccattgaagcagcggaaggtccgtatggcgaagaagggatgattgttcagcaattccacccgttaccgaaattcggcgacagctatatgctgattggtagctggctggtgaacgatcaacccgccggaattggcattcgtgaagaccgtgcattgatcacccaggatatgtctcggttttatccacatatttttgttgaataagccacgataccggatggcactcgccatccggtaattgttagcctatctgcaccgacagcatactcaggctgcccatttctataccctcaaccggaatggtaattggctcctgcccatcccacgcacctaacacatacaacaacggcaaataatgctctggcgttgggttcgataacgtgccaccttcatggtcgaggtaattcaccagaggatgttgttccactggcccttgccacgtcagattcgctttcacatactcattaaacgacgtcgcccacggatacggtgaactatcaccgtgccacttcactgtgcgcaggttatgcaccacgttaccgctggcgaccaacattattccttcatctcgcagcgctgccagtttgcgccccatttcgaaatgccaggcggcaggtttgctactgtcgatactcaactgcaccatcgggatatcagcgtcaggatacatcttaatcagcacgccccacgagccgtggtcaaagccccaggcttctttatccagcgtcaccgggatcggcgctaacagctcaaccagacgctgtgccagcgcaggcgaacccggagcaggataatgcgtatcgtacagcgcctgcgggaagccaccaaagtcatgaatcgtgggcggcgtctccatcgcggtcactcctgttccacgggtaaaccagtgagccgaaaccaccacaatcgcttgcgggcgtggcaatgtcatccccaacttctgccagctgcgggtatacaaattatcttccagcacgttcatcggactaccgtgacctaaaaacaatgctggcatacgtgttgaagacatgatgatatccttaactaaaggtgtcattttgatatcctcacaatacgcttgttcggcggagtaagaacccggataacaatgatgatgatcatcagttattttgacgatctgcctgaaggtgaagatttataaggagttgtcgatgtcagtacctctcattctgaccatactggcgggggcagccacgtttattggcgcgtttctcggcgttctcgggcaaaaaccctcgaaccgcttactggcgttttcgctaggttttgcggcggggatcatgttgctcatctcattaatggaaatgcttcctgccgcactagcagctgaaggaatgtcgcctgtgttgggttatggaatgtttatcttcggtctgcttggctattttggcctggaccgcatgttgccacatgctcatccgcaggatttaatgcaaaaatcggtgcagccgttgccaaaatcgatcaagcgcacagccattctgctcactctcggcatcagtctgcataacttcccggaagggattgccacctttgtcacggcgagcagcaacctggagctgggatttggcatcgcactggccgtcgcgttgcacaatatccctgaaggtctggcagtggcaggcccggtttatgcggcaacggggtctaaacgcaccgcgattctgtgggcggggatttctggactagcagaaattcttggtggtgtgctggcgtggttaatcctcggtagcatgatttccccggtggtcatggcggcaatcatggcggcggttgcaggaattatggtggcgctctcggttgatgaattaatgccgctcgccaaagagattgaccctaataataaccccagctatggcgtactatgtggaatgtcagtgatgggattcagtttagtgctgctacaaacggcgggaattggttaaaaacaacatcagaagttgtccagcgcatggacaacttctgccagcttcacgaaagccttattctaccttttcggctgtctcttctctcgtactgtttaagtatttgttccgcgcttcaagcagtgcgtctctgtcctggcgaaacgcccgacaataacgtttcaaatgcaggaaataacccaccacaaccagagcaatcaatacaatccagtaccaggcgataaacatccttttacccttaatatttaacaatactaaacatttagcgtataaatttcacatatcctttttcggatatattcatatggtcgcataataacggaacaattatatgattttgatcataatgaaaaagaatgcctgatattaatgaaattttctcatagaaagagaagcggaattaacatcttgcatagcagggaaaaataaaaaccgaagcctgctacaacttcggtttcttgattaaggcagtaaattaagcagcggttttcagctggctttacgctcatgtgcctgacggtatgccaccaggtcttcaatagtcacgagcgccatattgtgtttattggcaaactcaatacactctggtgcacgcgccatcgtgccatcgtcattagtcagctcacacagtacaccagccggtttaaagcctgccagcgtcatcagatcaatagttgcttcagtatgaccgccacgcgtcagtacaccacctgcctgagcgcgaagtgggaaaacgtggccaggacgattcagatctgacggttttgcgccatcggcaatcgctgcgcgaacggtcgtaatacggtcagcggcagaaacaccggtagtcacaccttcagctgcttcaatggtcacggtaaaaccggtgccataggcgctggtgttattttctaccatcattggcagatcgagttgtttacggcgatcttcagtaatgcacaggcaaacaataccgctaccgtggcgaatggtcagcgccatctgctcaacagtcatggtttctgccgggaagatcatatcaccttcgttttcacggtcttcatcatcaagcaccattacaccgcgtccttcacgcagcgcagccagtgcattttcaacacgttcgaaaggcgtaccaaaagaggaaagtagcgtctgattcatggtaaaaaaacctcactaaaattatggttaccagaatcagggcagtcttaggagtggcggcatatagccaaaataacgtgagcgggtccatgcccgacagaatcgttactctctcccatccggactctaaccgtcggccccggaattacaccggatctgctgtcctttgagttcgcacccaaagcgctcgcgggctttcaactgagttgatttaccgccggtggggaatttcgccccgccctgagaataagcggattcactataacgctaatgattagcggcagcaacgcatagcttcacataattctggtttatgacttacccttatcgcactacaatggcactcaacacctatcagtacagggaaactacaatgattgacccgaaaaaaattgagcaaatcgctcgccaggttcacgaatcaatgcctaaaggaatcagggagttcggggaagatgtggagaaaaaaatccgccaaaccctacaagcgcagctgacgcgcctcgaccttgtaagccgtgaagagttcgacgtccaaacgcaagtcctgttacggactcgtgaaaaactggcgctgcttgaacaaagaatcagcgaactggaaaatcgcagtactgagatcaaaaagcagccagatccagagactctccccccaacgctgtaaacattcgtctttaatgcactgtaaattatgaattaatcctctaatttatagtgctttctattaccttatcgcgtaatcccattcagaaaaccatcacaaaaatgaatgagtacaattgaaagtataattgcaatgtattttttaagttttacttaatcgatatttagataaactaattttataaaaaacacaaaataaaatatcatatttcaatgattagtagtccttaaataacagttactaatcattctcttttctacttatctttatataaaggaatattatgtccgcttttaaaaagtcacttcttgttgctggcgtagcaatgattctttccaataacgtgtttgctgatgaaggtcacggtattgttaaatttaaaggtgaagttatctctgctccatgttctattaaaccaggtgacgaagatttaactgtaaatctgggtgaagtagcagataccgtactgaaaagcgatcagaaatctttggctgaacctttcactattcacctgcaggactgcatgctgagtcagggtggaactacttattcaaaagcgaaggttactttcactacagcaaataccatgacgggtcagtctgatcttctgaaaaataccaaagaaactgaaatcggcggcgccactggcgttggcgtacgtattctggacagccagagcggcgaagtaactttaggtactccggtagtaattacgttcaacaataccaacagctatcaggaactgaatttcaaagctcgtatggaatccccaagcaaagatgccaccccgggcaacgtttacgctcaggctgactacaagattgcttacgagtaatcgcatttggccgggttcgcccggccacatcattaacggattaatgataagtggatcagatgtataaaaaattaaaattaaccacaataagcgaattgattaaaaatatttattgttcattatccgttattagactggccccctgaatctccagacaaccaatatcacttaaataagtgatagtcttaatactagtttttagactagtcattggagaacagatgattgatgtcttagggccggagaaacgcagacggcgtaccacacaggaaaagatcgcaattgttcagcagagctttgaaccggggatgacggtctccctcgttgcccggcaacatggtgtagcagccagccagttatttctctggcgtaagcaataccaggaaggaagtcttactgctgtcgccgccggagaacaggttgttcctgcctctgaacttgctgccgccatgaagcagattaaagaactccagcgcctgctcggcaagaaaacgatggaaaatgaactcctcaaagaagccgttgaatatggacgggcaaaaaagtggatagcgcacgcgcccttattgcccggggatggggagtaagcttagtcagccgttgtctccgggtgtcgcgtgcgcagttgcacgtcattctcagacgaaccgatgactggatggatggccgccgcagtcgtcacactgatgatacggatgtgcttctccgtatacaccatgttatcggagagctgccaacgtatggttatcgtcgggtatgggcgctgcttcgcagacaggcagaacttgatggtatgcctgcgatcaatgccaaacgtgtttaccggatcatgcgccagaatgcgctgttgcttgagcgaaaacctgctgtaccgccatcgaaacgggcacatacaggcagagtggccgtgaaagaaagcaatcagcgatggtgctctgacgggttcgagttctgctgtgataacggagagagactgcgtgtcacgttcgcgctggactgctgtgatcgtgaggcactgcactgggcggtcactaccggcggcttcaacagtgaaacagtacaggacgtcatgctgggagcggtggaacgccgcttcggcaacgatcttccgtcgtctccagtggagtggctgacggataatggttcatgctaccgggctaatgaaacacgccagttcgcccggatgttgggacttgaaccgaagaacacggcggtgcggagtccggagagtaacggaatagcagagagcttcgtgaaaacgataaagcgtgactacatcagtatcatgcccaaaccagacgggttaacggcagcaaagaaccttgcagaggcgttcgagcattataacgaatggcatccgcatagtgcgctgggttatcgctcgccacgggaatatctgcggcagcgggcttgtaatgggttaagtgataacagatgtctggaaatataggggcaaatccagttatcatcattggttgtgcgtcagcttatgccgttgaattcaacaaagatttaatcgaagccgaagatcgtgaaaacgttaacctttcccaatttgaaactgatggccaattacccgtcggcaaatattcactaagcactctgattaataataagaggacgccaatccaccttgacctccaatgggtattaattgataaccaaactgcagtttgcgtgacaccagagcaattaacattattaggatttactgatgaatttattgaaaaaactcagcaaaacctgatcgatggttgttaccctatcgaaaaagaaaaacaaattacaacttatctcgataaagggaaaatgcaattatccatatctgcacctcaggcatggttaaaatacaaagatgcaaactggacgcctcctgaactttggaatcatggtattgctggggcatttcttgactacaatttatatgcctctcattatgcaccacatcagggcgataattcgcaaaatataagttcctatgggcaggctggggttaatcttggggcctggcgcctgcgtactgattaccagtacgatcagtcatttaacaatggcaaaagccaggcgaccaacctggattttccgcgtatttatttgtttcgcccaatcccagcaatgaatgcaaaactaactataggtcaatacgatactgaatcctctattttcgactctttccatttttctggcatttcgttgaaaagcgatgagaatatgttaccgccagacctacgtggttacgcaccgcaaatcacgggtgtcgcacaaacgaatgcaaaggtcactgtctcacagaacaaccgtattatttatcaagaaaatgttcctccaggcccatttgctattaccaatttattcaatacattacaggggcaacttgacgtcaaggttgaagaagaggacggacgcgttacgcaatggcaagttgcatctaatagtattccttatctgacgcgtaaagggcagattcgctacaccactgctatgggtaaaccgaccagcgttggtggtgattccttacaacaacccttcttctggactggtgaattctcatggggttggctgaacaatgtatccctgtatggtggttcagttttaacaaaccgtgattatcaatctctggctgccggcgttggttttaatcttaactcattaggttcattatcttttgatgtcacacgatctgatgctcagttgcataatcaggataaagaaacgggttatagctaccgcgctaactattcaaaacgttttgaatctaccggtagccagctcactttcgctggttaccgtttctctgataaaaactttgtgacaatgaatgaatatatcaatgacactaaccattacacgaattatcagaatgaaaaagagagttatattgtcacgtttaaccagtatcttgaatcattaaggttaaatacatacgtaagtttggctcgtaatacttactgggacgccagcagtaatgtgaattattcattatcacttagccgcgattttgatatcgggccattaaaaaacgtctccacttctctaacatttagccgaataaactgggaagaagacaaccaggatcaactgtacctaaatatttcgattccctggggaactagtagaacattgagctatggtatgcaacgaaatcaggataatgagatttcgcatactgcttcgtggtatgactcttccgatcgaaataattcctggagcgtttctgcttcaggcgacaatgatgaattcaaagatatgaaagcgtcactacgcgccagttatcagcataataccgagaacggtcgactctacctctccggtacatcacagcgagacagttattattctctgaatgccagttggaatggttcattcactgcgactcgccacggtgccgctttccacgactatagcggtagtgctgactcgcgttttatgatcgacgcagacggcactgaagatattccgttgaacaataaacgcgcggtaactaatcggtatggcatcggagttattccatcagtcagcagttacataacaacatcattaagtgttgatacccgaaatctgccagaaaatgtggatatcgaaaactcggttatcaccaccaccttaaccgagggtgctattggctacgccaaacttgatacccgcaagggctaccaaatcataggggttattcgcctggcagatggtagtcatccaccactggggattagcgtaaaagatgaaaccagccacaaagaattaggactggttgctgatggcggctttgtatacctcaacggcattcaggatgataacaaacttgctttacgctggggtgacaaatcttgttttattcaaccacccaatagcagcaacttaaccaccggaacggctattttaccgtgtattagccaaaattaattcaggatgaaactaatgcgctacttaaatacaaagaatatcattgcagcaggagtattactctcctgtatgagcagcattgcctggggtgccatcatcccggatcgtacccgtatcataatgaatgagtcagataaaggcgaagcattaaaacttactaatcaaagtaaaaacctgccctatctggcccaaacatggatagaagatacgaaaggcaataaatcgcgtgactttattgtcactgttcctccaatggtgcgtttaaatcccagtgagcaaattcaaataagaatgataactcaggaaaaaattgctcaacttcctaaagacagagaaacgctcttctattttaacgtgcgagaaataccgcccaaaacagataaaaaaaatgtgatgcaagtcactatgcagcacgcattgaaactattctggcggccaaaagccattgaattagaagacgatggggtaatgacttacgaaaaagttgaaatcattcgtagaaatgacggttcgatccgctttaacaataagatgccttatcacgttacgctgggttatatcggaacaaatggggtaacgatgttaccacaaacgcaaagcttaatggtaaccccttttagctatgcaaatacgcagtttaaaaatgttccgtcaacttttcaggtgggttatatcaatgactttggtggattaagtttttatgaaataaactgccctgtagtaaataacatttgtaatatttctgtagccaaccgagatcaataatatgcgctacttgttaattgttattactttttttatgggttttagttcattacctgcatgggcaatggactgctatgctgaacatgaaggtggaaataccgttgtcattggttacgtaccaagaatctctatccccagcgatggtaaaaaaggtgataaaatctggcaaagcagtgaatattttatgaatgttttctgtaataatgcactaccaggcccatctccaggagaagaatacccatctgcatgggcaaatataatgatgttgttagcatcaggtcaagacttttataatcaaaactcttatactttcggtgtaacttataatggggttgattatgattctacatctccactacctattgcagcacctgtatgtattgatataaagggagccggaaccttcgggaatggctacaaaaagcccgcagtctgtagtggcggtcctgaaccgcaattatcagtaacttttccagtacgagtgcagctatatattaagctagctaaaaatgccaataaagtaaataaaaaacttgtattacctgacgaatatatagcacttgaatttaaaggtatgagcggagcaggtgctatagaagtagataaaaatctgaccttcaggattcgcggattaaataacattcatgtccttgactgctttgttaatgttgatctggaaccagctgatggcgttgtcgactttggtaaaataaattcccgaacaattaaaaataccagcgtgagtgagacgtttagcgtagtcatgaccaaagatccgggtgcggcctgtactgagcagtttaatattttagggagttttttcactacggatattttgagtgattatagccatctggatataggtaatggtctgctattgaagatatttcataacgatggaacagcaacggaatttaaccgcttctcacaatttgcttctttttcatcgtctagtgcgccttcggtcaccgcaccattcagggcagaactgagtgcgaacccggcagaaacggttgttgagggaccgtttagtaaagacgtaatcctgaaaatcacctataactagtatctaatacaaacactaaaacgggccatcaggcccgttatatcagtgctctaactccagctctcttgcctgcatcatctgttgacaataccaggcataacgtgcgcaaaaccaggttctatgttcttcatccatgttaccagtaacggccagaatatcgaccgggcgaccttctgcgtgcattctggcaaaactacgcgccaggaaatcgaaattatttaaagaattaagactatgatccataagcacatcctccggttatcgcataccttttaaggccatatgctttttctgatttcagtattccccaatcagtgtagtgcctttaaacataacgtgcgtaaatatattgtccccgatcacactttttagtgaaaaataaaaaaccatattaaaagactttctcttccagaacttctctaacctgtgttattattaacacagataaatgtaagcaaggaaactattacaaagtaaatattgcgtcactaaatggacattggagtgatatatgattttattcgccgactataacaccccttatcttttcgctatttcctttgtactgttgatcggcctgttagaaatttttgcgcttatctgcggtcacatgctctccggtgctcttgatgcacatcttgaccattatgattctataaccacaggtcatattagccaggcacttcattatctcaatattggaagattgccagctctcgtcgttctctgcttactggctggtttttttggtcttattggcatcctgttgcagcatgcctgcatcatggtctggcaatcaccactgtcgaacctgttcgtggttcctgtcagtttactgtttacgattattgcggtgcattataccggtaaaatagttgcgccctggattccacgcgaccatagttcagctattacagaagaagaatatattggtagcatggcgttaattaccggtcatcaagccacttcaggtaatccctgcgaaggaaaactcaccgatcaatttggccaaatacattatttactactggagcctgaagaaggaaaaattttcactaaaggagacaaagtgttaattatttgccgactttctgcaacgcgatatttggcggaaaataatccctggccccaaatattgtaatttattaatcaaaaggaaatttaataatggatgatattgttaattctgtgccctcctggatgtttaccgcaattattgccgtatgcattctgtttattattggaattattttcgccaggctctatcgtcgcgcttcggcagagcaagcttttgttcgtactggtttaggtgggcaaaaagtggtaatgagcggtggcgcaatcgtgatgccgatctttcatgaaataatccccatcaatatgaatactctgaagctggaagtcagccgctcaaccattgatagcctgattacgaaagatcgtatgcgcgtcgatgtagtagtcgctttctttgtgcgggtaaaaccttcagtagaagggattgccaccgctgcccagacgctggggcaacgcaccctgtcgcctgaagacttacgtatgttggttgaagataaatttgtcgatgccctccgtgcaacagctgcgcaaatgaccatgcatgagttacaggatacccgcgagaactttgtgcagggggtgcaaaatacagtggcagaagacctgtcgaaaaacggtctggaactggagagcgtttcacttaccaactttaaccagacctcgaaagaacatttcaatccgaacaatgcctttgacgccgaaggtttaaccaaactgactcaggaaacagagcgccgtcgccgcgaacgtaacgaagttgaacaggatgtagaagttgcggtgcgtgaaaaaaatcgcgatgcgctatcgcgcaagctggagattgaacagcaagaagcgtttatgacgcttgagcaggagcagcaggttaaaacccgtactgccgaacagaatgcacgtattgcggcttttgaagctgaacgtcgtcgtgaagcagagcagacacgaattctggctgaacgacagattcaggaaacagaaatcgaccgcgaacaggccgtccgctcaagaaaggttgaagctgaacgtgaagttcgcattaaagagatcgaacagcagcaggtcaccgaaatcgctaaccagacgaaatcgatcgctattgccgccaaatcggaacaacagtcccaggcagaagcgcgtgctaatctcgcacttgcagaagcggtaagcgcccaacaaaacgtagaaaccactcgccagactgccgaagccgatcgtgctaaacaagttgccctaatcgctgccgcgcaggatgcagaaaccaaagcggttgaactgaccgtgcgggcgaaagcagaaaaagaagccgcagagatgcaggcggcggctatcgttgagttagccgaagctacacgtaaaaagggtctggcggaagcagaagcacaacgtgcgctgaacgatgctatcaacgtactttctgatgaacaaaccagccttaaattcaaactggccttgttgcaggcgctgcctgcggtaatagagaaatccgttgagccgatgaagtcaatcgacggtatcaagattattcaggtcgatggtctgaatcgtggcggcgctgcgggtgatgcaaacacgggtaatgtggggggcggaaacctggcggaacaagcattatcagccgctctctcttaccgcacacaggcaccgctgattgactccttgctcaatgaaattggcgtttcaggcggctcactggcggcattgacttcacccttaacctcaacaactcccgtcgaagaaaaagcagagtaaaccctcttccaggaataatccctggcccaaaaagccggggattttttatatctgcgttccgctaaaaagtgcaaatgatcaggttgttgcagcattttgcgtgacggctcggggaaggcaaaactgcatcagagaaagcattgcgtggggtctggcgctcatcaacaatcggggagtcagcagggggctgaaacgggaaagcccctcccgaagaagggggccttacagaaggaaagggttatgatgaagctcgtcatcatactgattgtgttgttactcgtaagtttcgcagcttattaacagccaatcagaggggggagaaatcctccctcacccttgttcctttactttaggttgaaaaaaaatcagcgtcaagaaggtttcattaacacatatccctggcccaaaaagccggggattttttatatctgcgttccgctaaaaggtgcaaatgctcaggacgttgcagcgttttgcgtgaccgctcggggaaggcaaaattgcctctgggaaagcattgcgcggggtccggcgctcatcaacaatcggggggcagcaaggggctgaaacgggaaagcccctcccgaagaaggggccttgtataaggaaagggttatgatgaagctcgtcatcatactggttgtgttgttactgttaagtttcccgacttactaacaactcatcagaggggggagaaatcctcccttacccttgttcctttactctaggttgaaaaaacaacagcgtcaataggcctgccatgtacgaagcgagatctgtgaaccgctttccggttagccttttttatcctgttggatcttcttgatgatgttggtcgtcgagcaaccgtcttcaaagttgagcaccaacacttcgccaccgttggcccagacttctttactcccggcaatctcttctggtttatagtcgccgcctttcaccagcagatctggcaagatcccggcgatcaagcgctgcggcgtgtcctcttcaaacgacactacccagtcgaccgcttccagtgcgcccagcacaatcatacgctgttcgagtgggtttaccgggcgggaatcccctttcagccgtttggtggaggcatcgctgttgacggcaacaatcaagcggtcacccagcttgcgggcatttgccagataagagacgtgcccggcgtgcaggatgtcaaagacaccgttggtcatcaccactttttcaccacgtttacgcgctgccgctacggccagcttcagttcctcttcggtcatcacgccaaagcctgtatctgcacgtccacgtacagcattttccagctcgatcggcgaaaccgtggaggttcccagtttgccgaccaccacgccagccgccgcattggcaaagaagcaggcttcttccagcgaattacccgctgccagcgttgccgccaggacgccaatcaccgtgtcgcccgcaccggtaacgtcatacacttcctgcgcttgggttggcatatgcagcggcgctttacccggttgcagcagcgacataccctgttcggaacgggtcactaacagagccgagagttcgtaatcggcaatcagtttcatgccgcgctcaacaatctcttcttcggtcttacatttaccgacaacagcttcaaattccgagagattcggcgttaacagcgtagcgccgcggtagcgctcaaaatcggtaccttttggatcaatcagcaccggaacacccgctttacgcgccagttggatcatctgctgtacgcttgccagcgcacctttggcgtagtcagaaagcaccagcgcgccaatcgaactcagcgcctgattaatccgctcgtgcagcggctgcggatcaacaccttcgaaaccttcttcaaaatccagacggatcagctgttggttgcgggaaagtacccgtaatttggtaatggtcggatgcgtcggtacagaaacgaagtcgcatttgacgttgacgtcggccagagatttactcagcgcgcgcgctgcatcgtcaatgcccgtcaacccgaccaggcgtgcattagcaccgagagaagcgatattcatcgccacgttagccgcgccgcccggacgttcttcgatggtattcactttaaccacgggcaccggcgcttccggcgagatacgactggtggggccgtaccagtaacgatccagcatcacatcaccaaccaccatcactcctgcacgttcaaactctggcagcgttactttcattcctgtctcctgagagattcaaaatttgcgcgcgataataccatacttcattcttccaccagccacttctgccagcttgcccgcaccagttcacgctctgcggtgaagcaatcctccgacacatggcccggcaattcctgtaatgccagatgatgaagttcatcgcgaagcgtagtgtaagcacgggtcagcgccatcgcttcctgctcttccataatgtcgttttgcgccagtagttccagaatacgcacgttgtctgaccagcgcgttaacttcggtttttcatgagcgtagcgcaacaccagatattgggtaataaattcgatatcggtaattcccccttcatcagctttgatatcaaagcgatcgcgatgtttattgccgagatgagcgcgcattttctcgcgcatttcccgcacttccgtttgcagagttttaccttcacgcggcagcgtcataatctcgcgacgcactgcgtcaaagtgcgcggtgagctgcggatcgccgtacactacacgcgcacgcaccagcgcctgatgttcccacgtccaggcctcgtttttctgataatcggcaaatgcttctgcggatgtcaccagcattcccgccgccccggacggacgcagtcgagcatccacttcatacaaaatgccggaagaggtacgcgtactgaacagatgcataatgcgttgcgccagacgcagataaaactgccgcccgtcgatttcccgctcaccgtcagtcatcgcatccattgggcaatcatggaggaagataaggtcaagatcggaactgtagcctaactcccagccgcccagcttgccgtagccgaccaccgcaaaaccacgcccttcgcgttcgttcaggtgattcggcttaccgtagcgggcaaccatttgaacccacgcctgctgaacgacggcatctatcatggcttccgccagccaggttaagtgatcgctcactttcatcaccggtagcgtaccggcgatatccgctgcggcgatgcgtaacagctgcgcctgtttgaactgacgcagcgcctcaagctgttgctcttcgtcatcttccggcacgcgcagcaaatactggcgcaactcatcgcggtaggcatcggtcgccgtcggctggtaaagggtgtttggatcgagcaattcatccagcaataatggataacgcgccagctggctggcaatcatcggcgacgcggcacacagagaaatcaaatgtttaagcgccgcggggaattcactgagcaattctaaataggtggtgcgggtaacaatccccaccagcaaggcggtaatgcgcgacagcgtaacggcagcgtcttcacgcgcacagacatcacttagcagatgcggcatcagatggtcgagcacctgacgtcctcgcggcccgatggtgcgcttatccagctctttgcggaaatcggcaatcagcgttagcacctgtttgcgatcatcctcgctaagatgcgccagcactggcgtagtgtcatcttcctgcaacgcatcctgccacagctcacgccactgttccgacagcgactcttcctgagtttcactttcatcgtcgccaatcaattcattaaacacccggcgcacattggtcatatgtgcggtcagcgccccggtcagttgcggccagtcagcaaagtccatcgcccacgccagccgcgcacgattaagctcatcagaaggaagcgtctgggtttgttcgtcgttaatgctttgcagcaggttttccagacgccgcaggaacagatacgccactcgcaattgttcagcatcgttttcagaaagcagatgcagctcggcaatggcgctgagcgttggcagtaaagagcgcgattgcagcgacggttcgcgtccgccgcgaatgagctggaacacctgaacgataaattcaatttcgcgaatgccgcctgcgccgagtttgatattgtcggtcaaaccacgtcgacgcacttcacgggcaatcatccctttcatgttgcgcagcgactgaatcacgctgaaatcgatgtaacgacggaaaacaaacgggcgcagcatcgcacgcaactcgttagcatagacgccttcgctatcgcccataatccgcgccttgaccatcgcgtaacgctcccagtcgcgcccctgctcctggtaataatcttccaacgcggcaaagctcagcaccagcgggccactttcgccaaacggacgcagccgcatatccacgcgatagacgaagccatcctgcgttggttgatccagcactttaatcagccgctgccccatgcgggtaaaaaactgcgcgttatccagttcccggcgtccaccctgcgtacaaccatgttccggccaggcaaaaatcagatcgatatcagaggagaaattcagctccccaccgcccagcttacccatgcctaaaatcagcagcggttgcgcttcgccctgcgcattgcacggcgttccccactcgcggcagcaggcgtcatacagccagtcacgcgccgcaacaatcagcgtctccgccagatagctgagctgctgcaatatgctctcttcagtaaccagtgccagcgtttgcgcccaggcgatgcgcaccataatgcgccgccggaatagccgcagctcgcgcattaacccggcttcgtcactcacattacagagcgcctcctgcaaccatgccgcgtaatgctgccattcgtcggcctgcggcggttggctttccagttccgtcagccactctggatgcgcaatcacgctgtcctgcacaaaatcactaaaagtaagtactgacttcgcctgtgcgctaagtgattcctcggctaaaggctctggcagccgctcaacaacggtctgccagtactgctgtaacggtgaagagagcggcttcataagcgattttatccttgcctgattaacgttttccgctgtgcaaccagaacggttcctgattgtttgcctcattacggaaatgttcaatttcgatgcgttgcccggtcgcaatagcgtgatgcagcccctgccagttctccagccaggcttgcgcgacgacaggatcatagtaacccgccagcaacagtattgagtcaatatcacgcgtcaggcgtggcaactggtcacggtagcgatcgcctaacggctggcagaaaacgcttttcagttcagcggcatggcgggaaagatggatatcggcaaagcgtttgaaggagtcgctgattttgccctgcgctttggcatctaaaaatggctgccatgctttgcttaccaaccattcggtcaacgccagcttcgccattgccgtttcggtagagtagaccgccgtcacggcagacaccgcagaagcaatggtcgcctcgcattgagtcagcagatcacgtaagtgagtgctcgctttacgcggcacaataccaccgaacagcatcagcgtatgacggaccaggctaatggctgccagcacctgttctttcgccgcatcgttgccgcgtacccacagttcttcatgatactgccattgcgctaacgccagctcgagcgccgcttccagcccctgttccacatcggcttttgccgcaacatgcaaaatggtggtcggtttgatttcacgcgccggattgccctgcgccagatgatagccacgcgccgctttgctcaggctgccctggcgtaatccggtttgcgataccagttggttcgccagtttcagcaccgcgcgcgtgtcgccgctaagcagttccagttccagctcacagataggttcagcaaattcacccgctttcacttccccctggtcgagggcgatttcaatttggctaccatcgaccgccaccagccatttttcgcgataaaaatcggtgctgaacagcggctgcacgcgggaggcgagatcggcgggcaattcgccgttcggccagacttccgtcggtaactgcgccaggtcgagcgtcggttcgctcaacgccacgttatattccgggcgctgatgtaagccgcctgtcactcttcctgcaactttcatggtcatctcatagcgaccgttttcgccacgaatacgtaagcccatatcgtgcccacgcagccagttatccggcgtttcgtagtaaatattcagcaactgcacggggtcatggtgctcgccgcccagcgtattgagatggtcacgcaacgcctcaacggcactgtgattaacaataaactttaattcgatttcctgagccatggcctttacttatcggttatgtcacataagtgacgatgaacggcgaacttaatgcgatcttttttgtcagtagatagtattttgcgccaaattgccatgcaacgggcaatttgacgggcgtaaaagtttgaagcagtggcaagacctgacacagaggattccgattgatgtcgaatgctttgcgtagcgacactgatgccactactatcgttccactttccatgacaataacgacagcctgatgccaaaattacgcctgatcggattaactttactcgcacttagcgcgactgccgtctcacacgctgaagaaacgcgctatgtttccgacgaactgaatacctgggtccgcagcggtccgggagatcattatcgcctcgtgggcacggttaacgccggcgaggaagtgaccttattacaaactgacgccaacaccaattatgcccaggtgaaagacagctctggccgtaccgcctggatcccgttgaaacaacttagcactgagccaagcctgcgctcccgtgtgccagatctggaaaatcaggtcaaaaccctgaccgataaactcaccaatatcgataacacctggaatcagcgcaccgcagaaatgcagcaaaaagtggcgcagagcgacagcgtgatcaacgggttaaaagaagaaaatcagaaactgaaaaacgagctgattgtcgcgcagaaaaaggtcgatgccgccagcgtacagctggatgacaaacagcgcaccatcatcatgcaatggtttatgtatggcggtggcgtgctggggcttggcttgctgctcggtctggtactgccgcacctgatcccaagccgcaaacgcaaagatcgctggatgaactaaatcgccttcttcgttgcactgtcttattattaggaattgtgtatttgacgaagggatgatggcgtgaagatttatctggtcggtggtgctgttcgggatgcattgttagggctaccggtcaaagacagagattgggtggtggtcggcagtacgccacaggagatgctcgacgcgggctaccagcaggtaggccgcgattttcctgtgtttctgcatccgcaaacgcatgaagagtatgcgctggcacgtaccgaacggaaatccggttccggttacaccggttttacttgctatgccgcaccggatgtcacgctggaagatgatcttaagcgtcgcgatctgaccattaatgcgctggcccaggacgataacggcgagattatcgacccgtacaacggtctgggcgatctgcaaaatcgtctgttgcgccatgtttcccccgcttttggcgaagatccgttacgcgtattgcgcgtggcgcgttttgctgcgcgttatgcccacctcggttttcgtattgccgatgaaactctggcgttgatgcgcgagatgacccatgcgggtgaactggaacacctgacgcctgaacgggtatggaaagagacggaaagcgccctcaccacccgcaatccacaggtgttcttccaggtactgcgcgattgcggcgcactgcgcgttttattcccggaaattgacgcactgtttggcgttccggcccctgccaagtggcatccggaaatcgatacgggtattcataccttaatgacgctctcaatggcggcgatgctgagtccgcaggtcgatgtccgtttcgcaactttatgccacgatctcggtaaagggctgacgccgccagaactctggccgcgtcatcatggtcatggcccggcgggtgttaagttagtggaacaactatgccagcgtctgcgcgtgccaaatgaaattcgcgatttagccagactggtggctgagtttcacgatctcatccacaccttcccaatgctgaacccaaaaaccatcgtcaaattatttgattccatcgatgcctggcgtaaaccgcagcgtgtcgagcaactggcgctgaccagcgaggctgacgtgcgcggcagaaccggttttgaatcagcggactacccgcaaggccgctggttgcgcgaagcctgggaagtggcgcagtcagtgccgacaaaagccgtcgttgaagcgggatttaaaggtgtggagattcgcgaggagctgacccgacggcggattgcggcggtagccagctggaaggaacaacgttgcccaaagcctgaatgagtattgggcattttgccggatgcggcgtaaacgccttatccggctacatgtcaacgacagttgtaggcctgataagacgcgcaagcgtcgcatcaggcgttgattgccggatgcggcgtgaacgccttattcggcctacgcaatcgttgacaacgccaagcatccgacactattcctcaattaaaagaacacgacatacaccgcagccgccacaataaagcgataaatggcgaacgggataaacgaaatgcgcttaatcaattgcaggaaggttttaatcgctatcagcgccaccacaaaagcggtgataaacccaacggcaaacatcgggatatcgccgcttgtcaggaagccccagcttttgtagagatcgagcgccgttgcgcccatcatcatcggcaccgccagcaggaacgaaaactcggaagcagcgtaacggctcacccccatcagcatcccacctgaaatggtcgccccggaacgggagaaacccggccacagcgccagacactggaaacagccaatcataaatgcctgacgataggtcatatcatcaagacccggcgcacgcggctctttcggcttcaggcattcggcggcaatcagcaacaaaccgccaacgaccagcgcatacatcacatttatcgggttaaacaatgacttaatcgtgtcgtggaacaacagccccaataccaccgccggaatcatccccagcaaaatgtggatcagcgttaaacgacctttgctttcaccttcgtgctgcaacgggcggccaaagtggatgccaatcaggccaaacagacgccgccagaacatcactactaccgccagaattgatcctaactggatcacaacttcaaaggttttcgccgtgtcgccctcaaaccccaacaagtgaccgacaataatcatatggcccgtgctggataccggcagaaattctgtcaatccttcgaccacacccaatattgccgctatcagcagcgagtgcatatcgctcatcaataaacccctaaattattaaaatgtaccgcttgtccgaactactgcgtatgaccaggttataaccgtttggtttaacagctgtaaaattaattattttctttcagattattgccacgctcaatgattacgccaacattcgccgcccgcgccactgcgcctggcttgctgagtttgatacgcacccacggcgagttgaagcgtgctaacagcagctccgccacctcttcagccacgcgttccaccagcgcaaaacgcgccccctcgacgtggctgaccaccgtttctgcaatgtcagcgtaactgaggcaatccgccacatcatcacttttcgccgctttacggttatcccacgccatttcgatatcgaacactaacttctgttcgatggtctgttcccagtcgtaaacaccaatagtggtgattaccgaaagttgctctataaatacaatatccatcacgtcctgcctgctttttggctaaccggataccacttccggcgaaatgtgcgtattatccacagattcatcgttgaacacgaattttcaaaacggaacagcttatgagtgcaatcgcgcctggaatgatcctcatcgcgtacctctgcggctccatttccagtgccattctggtttgccgcttgtgtgggctgcccgatccgcgaaccagcggctccggcaatccaggcgcaaccaatgtgttacgtatcggtggcaagggagcagccgtagcagtactgattttcgacgttctgaaaggaatgttgcccgtctggggcgcgtatgaattaggtgtcagccccttctggctaggcttaattgccatcgccgcctgtcttggacacatctggcccgttttcttcggatttaaaggaggaaaaggcgttgctaccgcttttggtgccatcgcacccattggctgggatctcaccggagtaatggcgggaacctggttactgaccgtgctattgagcggatactcgtcgctgggagcgattgtcagtgcactgattgctccgttttatgtctggtggtttaagccacaattcaccttcccggtttcgatgctctcttgcctgatcctgctgcgtcatcatgacaacatccaacgtctgtggcgtcgtcaggagacaaaaatctggacgaaattcaaaagaaagcgcgaaaaggatcccgagtgatttctggtggatctacatgacctgatagccttcatcgggcttgcccagccgttgctggcaccatgccgccagaaattccacgcagacacgtaatttcatgctgcgatagagcggctcccggtaaacagcccagatattggcgctttgtgcatactctggcaatacttgcaccagtttgccactctccagaaacggcaacacatcccactcggaacgcagcataatccctttgccctccagcgcccattgcagcacaatctcgccgctattggaggaaagatgcccgcttaccttcaccgattttttctcctgaccgttccccaactcccatattccatgggtcatatcgcgctctttggtcaccagacagtcatgacgacttaattcctgtagggattgtggctgcggatatttttgcagatactcaggtgctgcgcataatattcttttattttttgtcaaaagatgcgcaatataataatcaggaatttcgtcattaatacgaatatccagatcaatattatcctgcactaaatcaatttgccgatcgaacaattcaaaatgcacctgtaactcaggataattgcgcatcagttcggtaatagctggcgcaatatggctgcgcccaaaaccaaaactgcaaccaatacgaatcatcccctccgggcgcgttttgatttgcgtgacgtcatcgaccagtcgctgatattgggtgaggatttccaacgcatgttcgtaacaacgttggccactttcagtcagcgccacgccgcgagcggagcggttcagcagcgttgttgccagcgtattttcaaggatttggatccgcttggtgacaaatgcaggcgtctgcccaagcgtcgccgctgcggcgctaaaactcccgctgtgaacgatttctaccagtacctgcaagtctttggctaaaggccagctattcagcatcgttaattatccgcagttgtgataagcgcagtgtatttcgcaaaacattgccattccctgctctggcgcaatattcattcttattttcgcgttgattcacgaactgttaattacatattcacggtggcaaaaaatataaaaccacatttttagtggtagtttgtggcggtgaatttttccagacaaatacaaaaactggagttgccatgatgagcgaaagtaataagcaacaggcagtgaataagttgacagagattgtcgctaactttaccgccatgatttctacccgaatgcctgatgacgtggtggataaactaaaacagctaaaggatgccgaaacgtcgtcgatggggaaaattatctaccatacgatgttcgacaacatgcaaaaagcgattgacctgaatcgtcctgcctgtcaggacaccggggagattatgttcttcgttaaagtcggttcccgcttcccactgcttggcgagctgcaaagcatactcaaacaagccgtggaagaggcaaccgtcaaagcgccactacgtcacaatgcggtagaaatttttgacgaagtaaacaccggcaaaaataccggtagcggcgtaccgtgggtcacctgggacatcatccccgacaatgacgatgcggaaatcgaagtttacatggcaggcggcggctgcacgctacctggccgctcgaaagtgttaatgccgtcagaaggctacgaaggcgtggtgaaattcgtcttcgaaaatatctccaccctcgccgtaaacgcctgtccaccggtactggtgggcgtgggcatcgccacctcggtggaaaccgccgccgtactctcgcgtaaagccattttgcgcccgattggcagccgccatcccaatccaaaagcggcagaactggagctacgcctggaagaaggactcaaccgtctggggattggtccacaagggctgaccggcaacagttcagtgatgggcgtacatatcgaatctgccgcccgccatccgtcaaccatcggcgttgctgtctctaccggctgctgggcgcatcgtcgcggcacgctgctggttcatgccgatctcacctttgaaaatctgtctcacacccggagcgcgttatgaaaaagatcctgacaaccccgatcaaagctgaagatctgcaagatattcgcgtcggcgatgtgatctacctgaccggtacgctggtgacctgccgcgacgtttgtcaccgccgtttgatcgaactgaaacgtccgatcccttacgatctcaacggcaaagcgattttccacgctggccccatcgtgcgcaaaaacggcgacaaatgggagatggtctccgtcggcccgacaaccagtatgcgtatggaaagttttgaacgtgaatttattgagcagaccggcgtgaaactggtggttggcaaaggtggtatggggccgctgaccgaagaaggctgccagaaattcaaggcgctacatgtgattttcccggcaggctgcgcggtgctggcggcaacccaggtggaagagattgaagaagtgcactggacagagctcggaatgccggagtcactgtgggtctgccgggtcaaagagttcggcccgctgattgtctctattgatacccacggcaacaacctgatagccgaaaacaaaaagctgttcgccgaacgccgcgatcccatcgtggaagagatctgcgagcacgtccattacatcaaataaccctcccggagaggctcacccctctcctttttcgcaggcataacacgatgaaaccttccactgaatggtggcgatatcttgcgccgctggcggtcatcgccattattgctctacttccggttcccgcagggctggagaaccatacctggctctactttgccgtttttactggcgtgatcgttggactgatcctcgaacccgtgccgggtgccgtggtggcgatggtgggtatatccatcatcgccatactctctccctggctgctgttcagcccggagcagctcgctcagccaggctttaaattcactgcaaaatccctctcgtgggccgtttccggtttttctaattcggttatctggctgattttcgccgcctttatgtttggcacaggctatgaaaaaaccgggcttggacgccgcattgcgctgattctggtgaaaaagatgggacatcgcacgctgtttctcggctatgcggtgatgttctccgagctgatcctcgcacctgtaacaccgtccaactcggcgcgtggtgcggggattatctatcccatcatccgtaacctgccaccgctctatcaatcacaaccaaacgacagcagttcgcgcagcattggctcgtacatcatgtggatggggattgttgccgactgcgtgaccagcgccattttcttgacggcgatggcaccaaacttgctgttaattggactgatgaaaagcgcatctcacgccacgctgagttggggcgactggttcctcgggatgttgccgctcagcattttactggttctgctggttccctggctggcttacgtgctgtacccgccggtactgaagtctggcgatcaggtgccgcgctgggcagagacggaactgcaggcaatgggcccgctctgttcgcgtgaaaaacggatgctggggctgatggtaggcgcgctggtgctgtggattttcggcggtgattatatcgatgccgcgatggtcggttacagcgtggtggcactgatgctgcttctgcgcattatcagttgggacgacattgtcagtaataaagcggcgtggaacgttttcttctggctggcctcgcttatcaccctcgccaccggactcaacaacaccggttttattagctggtttggcaaactgttagcaggcagcttaagcggttattcgccaacgatggtgatggtggcgttgattgtggtgttttatctactgcgctactttttcgccagcgccacggcgtatacctccgctctcgcaccgatgatgattgctgctgcgctggcgatgccggaaatcccgctgccggtgttctgcctgatggttggtgcggcaattggtctggggagcattcttacaccatacgccaccggccccagtccgatttactacggcagtggttatctgccaacggcggattactggcgactgggggcgatttttgggctgatattcctcgtattgctggtgattaccggcttactgtggatgcccgtggtgttgctttaagtgaggacggtgccggaaattgctctccggcacccaatagttttacgcagccggtaactccgccagcggccagcgcggacgcacgctaacgccgagatccgccgtcgcgcctgctttaaaccgcaccattccggcataggcgatcatcgcgccgttatcagtacaaaattccggacgcgcgtagaacacttcgccgcggcgttttttcatcatttcagccagcttcgcccgtaacgtacggttagcactcacgccgcccgccatgaccagtcgcttaaagcccgtctgatccagcgcccgcttgcacttaatcatcagcgtatcgaccaccgcatcttcaaaggcgcgggcgatatcagcacgcgtctggtcgtcggtgccgttgtcacgaatggtatttgccgcgaaggttttcaggccggagaagctgaaatccagccccggacggtcggtcatcggacgcgggaagacaaagcgcccggcagtaccctgagccgccattttcgacagtaacggcccgccaggataatccagccccagcagcttcgcggttttatcaaacgcttccccggcggcatcatcgatagactcgccgagcagctcgtactgaccaatgccagtcacgctgattaactgcgtatgaccgccggaaacaagcagcgcaacaaacggaaattccggcgggttatcttccagcatcggcgctaacagatgcccttccatatggtgtacagggatcgccggaacgtcccaggcaaacgccagagaacgccccacggtcgcgccaaccagtagcgcgccgactaatccagggcctgcggtataggccacagcatcaatgtcttttgccgttaaaccagactcctttagcgccgcctggatcaacggtacggttttacgcacatgatcgcgggaggccagttcaggcacgacgccgccgtagtcagcgtgcaatttcacctgactatacaattggttggctaacaaacctttttcatcgtcgtaaatggcgatgccggtttcatcgcaggaagtttcaatacccagtacacgcatgacttgttttacctcgctttattaccgcgcagtgtaggaccaatgcgggttgatgtaaaactttgttcgcccctggagaaagcctcgtgtatactcctcacccttataaaagtccctttcaaaaaaggccgcggtgctttacaaagcagcagcaattgcagtaaaattccgcaccattttgaaataagctggcgttgatgccagcggcaaaccgaattaatcaaaggtgagaggcacatgccggtaattaaagtacgtgaaaacgagccgttcgacgtagctctgcgtcgcttcaagcgttcctgcgaaaaagcaggtgttctggcggaagttcgtcgtcgtgagttctatgaaaaaccgactaccgaacgtaagcgcgctaaagcttctgcagtgaaacgtcacgcgaagaaactggctcgcgaaaacgcacgccgcactcgtctgtactaattccccgagagcgttgctctccgatcagaccgagttgtagttgtaaggccgtgcttccgaaaggaatgcgcggcttattttcgtttatgaattgctaaaaatcggggcctatggctggacgaatcccacgcgtattcattaatgatctgctggcacgcactgacatcgtcgatctgatcgatgcccgtgtgaagctgaaaaagcagggcaagaatttccacgcgtgttgtccattccacaacgagaaaaccccgtccttcaccgttaacggtgagaaacagttttaccactgctttggatgtggcgcgcacggcaacgcgatcgacttcctgatgaactacgacaagctcgagttcgtcgaaacggtcgaagagctggcagcaatgcacaatcttgaagtgccatttgaagcaggcagcggccccagccagatcgagcgccatcagaggcaaacgctttatcagttgatggacggtctgaatacgttttaccaacaatctttacaacaacctgttgccacgtctgcgcgccagtatctggaaaaacgcggattaagccacgaggttatcgctcgctttgcgattggttttgcgccccccggctgggacaacgtcctgaagcggtttggcggcaatccagaaaatcgccagtcattgattgatgcggggatgttggtcactaacgatcagggacgcagttacgatcgtttccgcgagcgggtgatgttccccattcgcgataaacgcggtcgggtgattggttttggcgggcgcgtgctgggcaacgatacccccaaatacctgaactcgccggaaacagacattttccataaaggccgccagctttacggtctttatgaagcgcagcaggataacgctgaacccaatcgtctgcttgtggtcgaaggctatatggacgtggtggcgctggcgcaatacggcattaattacgccgttgcgtcgttaggtacgtcaaccaccgccgatcacatacaactgttgttccgcgcgaccaacaatgtcatttgctgttatgacggcgaccgtgcaggccgcgatgccgcctggcgagcgctggaaacggcgctgccttacatgacagacggccgtcagctacgctttatgtttttgcctgatggcgaagaccctgacacgctagtacgaaaagaaggtaaagaagcgtttgaagcgcggatggagcaggcgatgccactctccgcatttctgtttaacagtctgatgccgcaagttgatctgagtacccctgacgggcgcgcacgtttgagtacgctggcactaccattgatatcgcaagtgccgggcgaaacgctgcgaatatatcttcgtcaggaattaggcaacaaattaggcatacttgatgacagccagcttgaacgattaatgccaaaagcggcagagagcggcgtttctcgccctgttccgcagctaaaacgcacgaccatgcgtatacttatagggttgctggtgcaaaatccagaattagcgacgttggtcccgccgcttgagaatctggatgaaaataagctccctggacttggcttattcagagaactggtcaacacttgtctctcccagccaggtctgaccaccgggcaacttttagagcactatcgtggtacaaataatgctgccacccttgaaaaactgtcgatgtgggacgatatagcagataagaatattgctgagcaaaccttcaccgactcactcaaccatatgtttgattcgctgcttgaactgcgccaggaagagttaatcgctcgtgagcgcacgcatggtttaagcaacgaagaacgcctggagctctggacattaaaccaggagctggcgaaaaagtgatttaacggcttaagtgccgaagagcgatcgggaagcccccgacagccgcactgagaggcagcggcaaatatataagtacgccctcgtaattatcgttggcggtaaacaaccgttggatttcagcgttaacggctgaaggacatcgggtcaatcgcccaacaccaacctcatgaaataagtgtggataccgtcttatggagcaaaacccgcagtcacagctgaaacttcttgtcacccgtggtaaggagcaaggctatctgacctatgccgaggtcaatgaccatctgccggaagatatcgtcgattcagatcagatcgaagacatcatccaaatgatcaacgacatgggcattcaggtgatggaagaagcaccggatgccgatgatctgatgctggctgaaaacaccgcggacgaagatgctgccgaagccgccgcgcaggtgctttccagcgtggaatctgaaatcgggcgcacgactgacccggtacgcatgtacatgcgtgaaatgggcaccgttgaactgttgacccgcgaaggcgaaattgacatcgctaagcgtattgaagacgggatcaaccaggttcaatgctccgttgctgaatatccggaagcgatcacctatctgctggaacagtacgatcgtgttgaagcagaagaagcgcgtctgtccgatctgatcaccggctttgttgacccgaacgcagaagaagatctggcacctaccgccactcacgtcggttctgagctttcccaggaagatctggacgatgacgaagatgaagacgaagaagatggcgatgacgacagcgccgatgatgacaacagcatcgacccggaactggctcgcgaaaaatttgcggaactacgcgctcagtacgttgtaacgcgtgacaccatcaaagcgaaaggtcgcagtcacgctaccgctcaggaagagatcctgaaactgtctgaagtattcaaacagttccgcctggtgccgaagcagtttgactacctggtcaacagcatgcgcgtcatgatggaccgcgttcgtacgcaagaacgtctgatcatgaagctctgcgttgagcagtgcaaaatgccgaagaaaaacttcattaccctgtttaccggcaacgaaaccagcgatacctggttcaacgcggcaattgcgatgaacaagccgtggtcggaaaaactgcacgatgtctctgaagaagtgcatcgcgccctgcaaaaactgcagcagattgaagaagaaaccggcctgaccatcgagcaggttaaagatatcaaccgtcgtatgtccatcggtgaagcgaaagcccgccgtgcgaagaaagagatggttgaagcgaacttacgtctggttatttctatcgctaagaaatacaccaaccgtggcttgcagttccttgacctgattcaggaaggcaacatcggtctgatgaaagcggttgataaattcgaataccgccgtggttacaagttctccacctacgcaacctggtggatccgtcaggcgatcacccgctctatcgcggatcaggcgcgcaccatccgtattccggtgcatatgattgagaccatcaacaagctcaaccgtatttctcgccagatgctgcaagagatgggccgtgaaccgacgccggaagaactggctgaacgtatgctgatgccggaagacaagatccgcaaagtgctgaagatcgccaaagagccaatctccatggaaacgccgatcggtgatgatgaagattcgcatctgggggatttcatcgaggataccaccctcgagctgccgctggattctgcgaccaccgaaagcctgcgtgcggcaacgcacgacgtgctggctggcctgaccgcgcgtgaagcaaaagttctgcgtatgcgtttcggtatcgatatgaacaccgactacacgctggaagaagtgggtaaacagttcgacgttacccgcgaacgtatccgtcagatcgaagcgaaggcgctgcgcaaactgcgtcacccgagccgttctgaagtgctgcgtagcttcctggacgattaatcggtaggccggatcaggcgttacgccgcacccggcactaggccctctgcacaaacgccaccttttcggtggcgttttttatcgcccacgcactaccagcgcctggtccagctcgcgatacgcttcaaccagtttctccagtgaaacgcgacttaaaccgctgggatttggcagcacccaaatctgcgtcgaaccaatggtgagcgtttgtttcccccactgtgcaccgcgctggctgaatccctgttcatatgcttgtttgcccagaatcgccaacgcctgcggctgataatcttcaattttttcaatcagcttacgcccgcctgcgtgtagctcctgctttgaaacttcattggcttgcaccgttggacggtctaccagtttggtgacgccacaacgataatccagcagatgctgtgcctcctgcggcttcaactgacggtcggtaaacccggcctgatatatcaccttccagaagcgatttgccggatgagcaaagggaaaaccagtcccggcggatgaaagcccagggttgataccgcaaaacacgacccgtaaccctggagccaaaatatcctcaaccatatttactcctttctaacatcaccaggaaaagtataacggattgaaaatacattgtttataaaaacagcaggcgcgcggtaatggctggattgcgacacggagttactttataatccgctaccatggccccttagctcagtggttagagcaggcgactcataatcgcttggtcgctggttcaagtccagcaggggccaccagatatagcaaaggctgacgagaaatcgtcagcctttttctttttatatatcagttactttgcgtgccagtaagccgctgcacgtacccgctgtgggtcatactgttccgcttcaaagcggcggcttaaattcttaacgactttaccttcgccggttatccagatgaagtaatcatcggcagggatttgcatctgcgccagacgcgcatctaccgcctgctcatcatgtgccagccattcgatattaaaaccatcaaggtgcgcgagataatcctgacaggcgttatcccgcacgctaaccagcgcactaacttgcggtttaacggcaagtttgctcaacgtttccaggcggcggcgcaatgcaggcattccggattcatcgcagacatacagctgatacgcgtaatcttccggcaccaccagcgaaccgcgcggacctgccaccgtaagtttatcgcccggttgcgcctgcatcgcccagccgctggcgaccccaccgtcgtgaataaagaaatcaatcgccagttcatggcgtagttcgtcatacagcggcgtatagtcacgcgacggtgggcgtggtccttccggccagacgatgccctcttccgttaccgttggcggcacaaagtgagcgtcaggttgaggaaagaagagtttgctgtgatcgtcaaagccacgcgatgtaaaaccgtccagcgcctcgccgccgaggacaatgcgctgaaaaccggcgctgatgcgctcaacgcgtaacacagtcagttcacggaagcgcagatcattgcgaacgcgctgcgggtagcggggggtgttattcattgttatcgccttcgtgatggtaatcagatatatctaaataaaactcgcaaatgataatgattgttaatcatgataaatgcaagcgatttgtagaactgatatgtctatagtctgataagacgaaccgcctcttctcaggcatcattactcaacgccggatgcggcgtgaacgccttatccggcctacgtgtgagatgagtccacgtttaaaaatcatttttacacttgcaagaacgctcatatcagatataaattagatatatctaattaagcaaaaggaggctgatatgagccatcatcacgaagggtgttgtaaacatgaaggccagccacgccatgagggctgctgcaaaggtgagaagtcagaacacgagcactgcggacacggtcaccagcatgaacacggtcaatgctgcggtggtcgccacggtcgcggcggcggtcgtcggcaacgtttctttggtcacggtgaattacgtctggtgattctggatattctctcgcgcgatgacagccacggttacgaattgattaaagcgattgagaatctaacccaggggaattacaccccaagcccgggcgtcatctacccaacgctggattttctgcaggagcagtcgctgattaccatccgcgaagaggaaggaggtaagaagcagattgcgctgaccgaacaaggcgcgcagtggctggaagaaaaccgcgaacaggtggagatgattgaagaacgcatcaaagcgcgttgcgttggcgcggcgctgcgccagaacccgcaaatgaagcgggcgctggataattttaaagcggtgctggatttacgcgtcaaccagagcgatatcagtgatgcacaaataaaaaagatcattgcggtgatcgaccgcgccgcttttgatattacgcaactggattaatcgccgcatccgccagtggcgcggtgcaattgccggatgcgacgcttgacgcgccttatccggcctacacccgctacacaccccgcaggcctgataagatgcgccagcatcgcatcaggcattgtgctccaaccgccggatccggcataccgattaatgcagtaccgtcaccgcgtcttccagtcggctggcgcggtgtttcaccatcgccgacacctgcgcactctcttccaccagctcggcatttttctgggtgatcaggttaagctcatccactgcacgggtcaggctggaaagcccatcggcctgttccagcgttgaatggctaatctgggcgatcaactgggtgacgtttttcacctgtgccacaatatcttccatcgtccgtccggcggcgtgtacctgctgcgaaccggattgcaccttatcagcactggcatcaatcagcttgcgaatatcgttggcagcattagcgctgcggctggctaaatgacgcacttcccctgccaccactgcaaaacctttgccctgttcgccggcacgcgccgcttccaccgccgcattcagggccagaatattggtctgaaacgcaatatcgttaatcagcgaagtaatggtgccaatgcgctgggtactgtcggcgatatcgtccattgtcttgatcaccgtggtcatcgcctccccaccctgcactgccgcattactggcagtgattgacagtttatcggcagccgacgccgtggcagagttctgtttcaccgacgccgccatttggttcatggtcgccaccgtttgctgaacgttatcaactgtctgctgggtatgttcgttcagttcatcggtgcctttcgccagcgtctcactgccatttctgacactggacacctggcttgagacatcgttaattagccaacggcacatcaggccaagttgccctaccgcacgtaatgtcagccccagctcatcgctgcgattcagatgctcaacactattacgttctccggtcgccaccttcagtgcctgatgggcaacattttctatcgggcgcacaatctgccattcaaaacaggcgcttgccaacaataccactaacgcacagaggatatacgtcaccaccggggcagcaacaaaccaaagcatggccgccagcaagataaacatcagggtcatcactccacgcgcccgccagcgaagcggtaatgaaggcagtttacccagccagcctttacgcaccaccaggcctttatgaatacgcttactggtacgtccggcgttcaacgctttgtacagcggctccaccgccgcgatctcttcatccgtcgcccgggtacgaatcgacatatagccactgatttttccctcgcgcaccatcggtaccgcattggcccgcacccaataatggtcaccatttttgcggcgatttttcacgatgccgctccagggctccccttttttcagggtgaaccacatatccgcaaacgccgcttttggcatatccgggtgacgcaccatgttgtgcggctgcccttgtaactcttgcaaggtatagccgctcacctgcacaaaagtgtcattagcatgagtgatatagctttgcagatcggtagtggacatcagagtggtatcgtccgccagcggggtattttgctgggtgacatacggatgagaagacatgttcgcgtcctgtgcaggttatatggttgttaacttcttgtcagagtttatgtcggccccgctgcggttatctttaaccgattaatttgatttagatcgcaatttgcgatttaaacacaaatctaattccttgatttaaaatactttcactctgttactatacgaaaacgttaattatcttgcccaaaaatcaggcaattattgccctgaaaacgtgcatttgcgcagcaatcatcaaatccatacccgacaaaaaccgtgcaaaataacaacaaatgttaacagatagcattaaatattgcacaaatgataaccgaatttgtgtttatcccgattttcgcgatcgcagccggagtggcgcaatccctgcaatacttaaatcggtatcatgtgatacgcgagcctccggagcatattttgaacaggttaccttcgagcgcatcggctttagcgtgcagcgcccacgccctgaatctcattgagaagcgaacgctggatcatgaggagatgaaagcacttaaccgagaggtgattgaatacttcaaagagcatgtcaatccggggtttttagagtatcgcaaatctgttaccgccggcggggattacggagccgtagagtggcaagcgggaagtttaaatacgcttgtcgacacccagggccaggagtttatcgactgcctgggaggttttggaattttcaacgtggggcaccgtaatccagttgtggtttccgccgtacagaatcaacttgcgaaacaaccgctgcacagccaggagctgctcgatccgttacgggcgatgttggcgaaaacccttgctgcgctaacgcccggtaaactgaaatacagcttcttctgtaatagcggcaccgagtccgttgaagcagcgctgaagctggcgaaagcttaccagtcaccgcgcggcaagtttacttttattgccaccagcggcgcgttccacggtaaatcacttggcgcgctgtcggccacggcgaaatcgaccttccgcaaaccgtttatgccgttactgccgggcttccgtcatgtgccgtttggcaatatcgaagccatgcgcacggctcttaacgagtgcaaaaaaaccggtgatgatgtggctgcggtgatcctcgaaccgattcagggtgaaggtggcgtaattctgccgccgccgggctatctcaccgccgtacgtaagctatgcgatgagttcggcgcactgatgatcctcgatgaagtacaaacgggcatggggcgcacgggcaagatgttcgcctgcgagcatgagaacgtacagccggatatcctctgccttgccaaagcgctcggcggcggcgtgatgccgattggcgcgaccatcgccactgaagaggtgttttcagttctgttcgacaacccattcctgcataccaccacctttggcggcaacccgctggcctgtgcggcggcgctggcgaccatcaatgtgttgctggagcagaacttaccggctcaggctgagcaaaaaggcgatatgttgctggacggtttccgtcaactggcgcgggaatatcccgatctggtacaggaagcgcgtggtaaagggatgttgatggcgattgagtttgttgataacgaaatcggctataactttgccagcgagatgttccgccagcgcgtactggtggccggaacgctcaataacgccaaaacgatccgcattgaaccgccactgacactgaccattgaacagtgtgaactggtgatcaaagcggcgcgtaaggcgctggcggccatgcgagtaagtgtcgaagaagcgtaatatcaaatcggatggcgatacgacgtcgccatccgatctttttatacgacgcgtacgcccgcaggcatcatccgctccggcgttaacagcacgctttcactgccgtcatcggtttccgcacacaacagcatgcattccgacgtttcaccacgcattttcgctttttgcagattgcataagaccaccaccgttttccccatcagctcttcttcgctgtagtacggcaccaggctggtcacggtttgcagcgttttttgccccacatcaacctgtacgatgtacagcttgtcggcgttttcatggcgtttcacttccacaatctttccgacgcgcatttccagacgtgcaaaatcagcgtaagccacggtttccattgcttcctcccttagggtaaaattttactaaactatagcaaaagtttttctcaatcctgtaggctaaaaatggagaatgcaggcgtgatcacattcgtgagccgctgtgttaccgttacagcgtcaaagaaacgcgctttatttactgaaaacaggtgacccgataagcacttcctctacaatgggggcgcacatcagggaaagtaaaaaaggtaaacatggcaacactaaaagacatcgcaatcgaagctggcgtatccctggcgacagtatccagggtcttaaatgacgatccgacattgaatgtgaaagaagagacgaaacatcgcattctcgagatcgccgaaaagctggagtacaagaccagtagtgcccgtaaactccagacaggtgcagtcaaccaacaccatattctggctatctacagctaccagcaggagctggagatcaacgatccttactatctggcgatccgccacggcattgaaacccagtgcgaaaagctgggcatcgagctcaccaactgttatgaacacagcggcttaccagacattaaaaacgtcaccggtattttaattgtcggcaaacccacgcccgccctgcgcgccgctgccagcgcgttgaccgacaatatctgttttatcgactttcacgaacccggcagcggttacgatgcggtggatatcgatctggcacgcatcagtaaagaaatcatcgacttctatatcaaccagggcgttaatcgtattggttttattggcggtgaagatgagcctggcaaggcggatattcgtgaggtcgcctttgcggaatatggccgactgaaacaagtggtacgcgaagaggatatctggcgcggcggtttttccagttcgtcgggttatgaactggcaaaacaaatgctggcgcgggaagactatccgaaggcactgtttgttgcttccgattccattgctatcggcgtactgcgggcaattcatgaacgaggcctgaacatcccacaggatatttcgcttatcagcgttaacgatatccccaccgcgcgatttacctttccgccgctctccaccgtgcgcatccattccgagatgatgggaagtcagggcgttaacctggtgtatgaaaaagcccgcgatggtcgcgcgctgccgctgttagtcttcgttcccagcaaattaaaactgcgcggcacgacccgttaaatccccttacacactgtccggcaatcgtttttgccggacagtgctgccgtttattttcgtgatccagttaaagtaaatgcatttacctgctactttttagtaaaaattttactaaactccccagcaattacacaaactaccatcaccatgaatggttccgatttctctctaccgggaggccctatgaatcgctgggaaaacattcagctcacccacgaaaaccgacttgcgccgcgtgcgtactttttttcatatgattctgttgcgcaagcgcgtacctttgcccgcgaaaccagcagcctgtttctgcccttaagcggtcagtggaatttccacttttttgaccatccgctgcaagtaccagaagccttcacctctgagttaatggctgactgggggcatattaccgtccccgccatgtggcaaatggaaggtcacggcaaactgcaatataccgacgaaggttttccgttccccatcgatgtgccgtttgtccccagcgataacccaaccggtgcctatcaacgtattttcaccctcagcgacggctggcagggtaaacagacgctgattaaatttgacggcgtcgaaacctattttgaagtctatgttaacggtcagtatgtgggtttcagcaagggcagtcgcctgaccgcagagtttgacatcagcgcgatggttaaaaccggcgacaacctgttgtgtgtgcgcgtgatgcagtgggcggactctacctacgtggaagaccaggatatgtggtggtcagcggggatcttccgcgatgtttatctggtcggaaaacacctaacgcatattaacgatttcactgtgcgtaccgactttgacgaagcctattgcgatgccacgctttcctgcgaagtggtgctggaaaatctcgccgcctcccctgtcgtcacgacgctggaatataccctgtttgatggcgaacgcgtggtgcacagcagcgccattgatcatttggcaattgaaaaactgaccagcgccagctttgcttttactgtcgaacagccgcagcaatggtcagcagaatccccttatctttaccatctggtcatgacgctgaaagacgccaacggcaacgttctggaagtggtgccacaacgcgttggcttccgtgatatcaaagtgcgcgacggtctgttctggatcaataaccgttatgtgatgctgcacggcgtcaaccgtcacgacaacgatcatcgcaaaggccgcgccgttggaatggatcgcgtcgagaaagatctccagttgatgaagcagcacaatatcaactccgtgcgtaccgctcactacccgaacgatccgcgtttttacgaactgtgtgatatctacggcctgtttgtgatggcggaaaccgacgtcgaatcgcacggctttgctaatgtcggcgatattagccgtattaccgacgatccgcagtgggaaaaagtctacgtcgagcgcattgttcgccatatccacgcgcagaaaaaccatccgtcgatcatcatctggtcgctgggcaatgaatccggctatggctgtaacatccgcgcgatgtaccatgcggcgaaagcgctggatgacacgcgactggtgcattacgaagaagatcgcgatgctgaagtggtcgatattatttccaccatgtacacccgcgtgccgctgatgaatgagtttggtgaatacccgcatccgaagccgcgcatcatctgtgaatatgctcatgcgatggggaacggaccgggcgggctgacggagtaccagaacgtcttctataagcacgattgcattcagggtcattatgtctgggagtggtgcgaccacgggatccaggcacaggacgaccacggcaatgtctggtataaattcggcggcgactacggcgactatcccaacaactataacttctgtcttgatggtttgatctattccgatcagacgccgggaccgggcctgaaagagtacaaacaggttatcgcgccggtaaaaatccacgcgcgggatctgactcgcggcgagttgaaagtcgaaaataaactgtggtttaccacgcttgatgactacaccctgcacgcagaggtgcgcgccgaaggtgaaacgctcgcgacgcagcagattaaactgcgcgacgttgcgccgaacagcgaagcccccttgcagatcacgctgccgcagctggacgcccgcgaagcgttcctcaacattacggtgaccaaagattcccgcacccgctacagcgaagccggacaccctatcgccacttatcagttcccgctgaaggaaaacaccgcgcagccagtgcctttcgcaccaaataatgcgcgtccgctgacgctggaagacgatcgtttgagctgcaccgttcgcggctacaacttcgcgatcaccttctcaaaaatgagtggcaaaccgacatcctggcaggtgaatggcgaatcgctgctgactcgcgagccaaagatcaacttcttcaagccgatgatcgacaaccacaagcaggagtacgaagggctgtggcaaccgaatcatttgcagatcatgcaggaacatctgcgcgactttgccgtagaacagagcgatggtgaagtgctgatcatcagccgcacagttattgccccgccggtgtttgacttcgggatgcgctgcacctacatctggcgcatcgctgccgatggccaggttaacgtggcgctttccggcgagcgttacggcgactatccgcacatcattccgtgcatcggtttcaccatgggaattaacggcgaatacgatcaggtggcgtattacggtcgtggaccgggcgaaaactacgccgacagccagcaggctaacatcatcgatatctggcgcagcaccgtcgatgccatgttcgagaactatcccttcccgcagaacaacggtaaccgtcagcatgtccgctggacggcactgactaaccgccacggtaacggtctgctggtggttccgcagcgcccaattaacttcagcgcctggcactatacccaggaaaacatccacgctgcccagcactgtaacgagctgcagcgcagtgatgacatcaccctgaacctcgatcaccagctgcttggcctcggctccaactcctggggcagcgaggtgctggactcctggcgcgtctggttccgtgacttcagctacggctttacgttgctgccggtttctggcggagaagctaccgcgcaaagcctggcgtcgtatgagttcggcgcagggttcttttccacgaatttgcacagcgagaataagcaatgaggatcatcgataacttagaacagttccgccagatttacgcctctggcaagaagtggcaacgctgcgttgaagcgattgaaaatatcgacaacattcagcctggcgtcgcccactccatcggtgactcattgacttaccgcgtggagacagactccgcgaccgatgcgctatttaccgggcatcgacgctattttgaagtgcattactacctgcaagggcagcaaaaaattgaatatgcgccgaaagagacattacaggtagtggaatattatcgtgatgaaactgaccgtgaatatttaaaaggctgcggagaaaccgttgaggtccacgaagggcaaatcgttatttgcgatatccatgaagcgtatcggtttatctgcaataacgcggtcaaaaaagtggttctcaaagtcaccatcgaagatggttatttccataacaaataacaactacggcggcaaaaggagtttgccgccaccgctaccctactcattttcggagatgtgttatgtctgataccaaacgtaatacaatcggcaaattcggcttgctctcgctgacttttgccgccgtttacagctttaacaacgttatcaataataatattgagcttggactggcctcggcaccgatgtttttcctcgcgacgattttttattttattcccttctgtctgatcatcgcagaatttgtttcgttaaataaaaactcagaagccggtgtctacgcgtgggtaaaaagttcgctgggcggacgttgggcatttattactgcctatacctactggttcgtaaacctgttctttttcacctcactgttgccgcgcgttattgcttatgcttcgtatgccttcctcggatacgaatatattatgacgccggttgccaccaccattatcagtatggtgctgttcgccttctccacctgggtttccaccaacggggcgaaaatgttggggccaattacctccgtcacttcaacgctgatgctgctgttaacgctctcctacattttactggcaggtacggcgctggttggcggcgtacagcctgctgacgccatcaccgttgacgcgatgatcccgaacttcaactgggcgttcctcggcgttaccacctggatctttatggccgcaggtggcgcggagtccgtcgctgtgtacgttaacgacgtcaaaggcggttcgaaatcgttcgttaaagtgatcatcctcgccgggatttttatcggcgtactgtattccgtctcctcggtgctgattaacgtcttcgtcagcagcaaagagttgaaatttaccggcggatcggtgcaggtattccacggcatggcggcgtattttggtctaccggaagcgttgatgaatcgctttgtcggtctggtgtcctttaccgcgatgttcggttccctgctgatgtggaccgcaacgccggtgaaaattttcttctccgaaatcccggaaggcatctttggtaagaaaaccgtcgaactgaacgaaaacggcgttccggcgcgcgcagcgtggatccagttcctgatcgtcatcccgctgatgattatcccgatgctcggttccaataccgtgcaggatctgatgaatactattattaatatgaccgccgcagcgtccatgcttccgccgttattcatcatgctggcttacctgaatttacgcgccaaattagatcacctgccacgcgatttccgtatgggctcccgccgcaccggtattatcgttgtttcaatgctgattgcgatatttgccgtagggtttgtcgcttcgacattcccgactggcgcgaatattctgaccatcattttttataacgtcggcggtattgttatcttccttggctttgcgtggtggaaatacagtaaatatataaagggattaacggctgaagagcgccatattgaagcgacgccagccagcaatgttgattaagcagaataataaaaaatgagcaggcattttccctcttcctggatgaggagagggaaaatagtttctgcctttatatttttataattacaacgataaaaggctgtactttttctttagctcatggattaacacaatgaaattaatcactgcaccatgcagagcattacttgctctgccgttttgctacgccttttctgcggcaggagaagaagcacgtccggcagaacatgacgacacaaaaacacccgcaattacctcgacatcttctccttcatttcgtttttacggcgaattaggggttggtggatatatggatttagagggtgagaataaacataaatacagcgacggtacctatattgaaggtggcctggagatgaagtacggctcctggttcggcctgatttacggcgaaggctggaccgtgcaggccgaccacgacggcaatgcctgggtgccagaccatagctggggtggtttcgagggcggaattaaccgtttctatggcggttatcgtaccaatgatggcaccgaaatcatgctcagtctgcgtcaggattcctcgctggatgacctgcaatggtggggcgatttcacccccgatctgggctacgtcattcccaatacccgcgacattatgactgcgctgaaggtacagaacttaagcggcaactttcgttatagcgtcaccgcgactcctgccggacatcatgatgaaagcaaagcctggctacattttggcaaatacgatcgctatgacgacaaatacacctatccggcaatgatgaacggttacatccagtatgaccttgccgaaggcatcacctggatgaacggtctggaaatcaccgacggcacaggacagctctatctcacgggcctgctaactcctaactttgccgctcgcgcctggcaccataccggacgcgccgacgggctggacgtaccgggaagtgaaagtgggatgatggtgagcgccatgtatgaagcgttaaagggcgtttatctctccaccgcttacacctacgccaaacatcgccctgaccacgctgacgatgaaaccacctctttcatgcagtttggtatctggtacgaatacggcggcggacgtttcgccacggcttttgatagccgcttctacatgaaaaatgcctctcacgatcccagcgaccaaatcttcctgatgcaatatttctactggtaataaggactgtaatttcatgaaaataaaaactattttaacgccagtaacctgcgctctgctgataagtttttccgcccatgccgctaacgccgacaattataaaaacgtgattaaccgtactggcgcgccgcagtacatgaaggattacgattacgacgatcaccagcgttttaatccgtttttcgatctcggagcctggcatggtcatctgttgccagacggccctaacaccatgggcggctttccgggcgttgcgctgctgacggaagagtacatcaactttatggccagcaatttcgaccgcctgaccgtctggcaggacggcaagaaagtcgactttacgctggaggcatacagtattcccggtgcgctggtgcaaaaactgacagcaaaagatgtgcaagtcgaaatgactctgcgcttcgccacgccgcgcacgtcactactggaaaccaaaatcaccagcaataaaccgctggatctggtgtgggacggcgaactgctggaaaaactggaagcgaaagaagggaaaccgctttccgataaaaccattgctggcgaataccctgactatcagcgcaaaatcagcgccacccgtgatggcctgaaagtcacctttggcaaagtgcgcgccacctgggatctgctgacctccggcgaatcggaatatcaggtgcataaatccctgccggtgcagactgaaatcaacggtaatcgctttaccagtaaggcgcatatcaacggttcgaccacgctctacaccacctattcccatctgctgaccgctcaggaagttagcaaagagcaaatgcagatccgcgatattctggcgcgtccggcgttttatctcaccgcctcgcagcaacgctgggaagaatacctgaagaaagggttaaccaatccggatgcgacgccggaacagacgcgcgtcgcggtgaaagcgatcgaaacgctcaacggtaactggcgctcaccgggcggtgcggtgaaatttaacaccgttacaccgtcggtgaccgggcgctggttctccggcaatcagacctggccgtgggatacctggaagcaggcgtttgcgatggcgcatttcaatccggacatcgccaaagagaatatccgcgcggtcttctcctggcagatccagcctggcgatagcgtgcgtccgcaggatgtgggctttgtccccgacctgatagcgtggaaccttagccccgagcgtggtggcgatggcggcaactggaacgaacgtaataccaaacccagccttgccgcctggtcggtgatggaagtgtataacgtcacccaagataaaacctgggtggcagagatgtacccgaaactggtggcctatcacgactggtggttacgtaaccgcgatcacaacggcaacggcgtgccggaatatggcgcgacccgcgacaaagcccacaacactgagagcggcgagatgctgtttacggtgaaaaaaggcgataaagaagagacgcagtctgggctgaacaactacgcccgcgtggtggagaaaggccagtacgacagtctggaaattccggcacaggttgctgcatcgtgggaatcggggcgtgatgatgccgccgtctttgggtttatcgacaaagaacagttggataaatatgtcgctaatggcggcaaacgtagcgactggacggtgaaattcgccgaaaaccgcagtcaggacggaacgttgctgggctactcgctattgcaggagtcggtggatcaggccagctatatgtacagcgataaccattatctggcggagatggcaaccatcctcggtaagccagaagaggccaaacgctatcgccagttggcacagcagctcgcggactacatcaacacctgtatgttcgacccgactacccagttctactatgacgtacgtattgaagataaaccactggcgaacggctgcgcgggcaaaccgattgttgagcgcggtaaagggccggaaggctggtcgccgctgtttaacggtgcggcaacgcaggccaatgccgacgcggtggtgaaggtgatgctcgatcctaaagagttcaacacctttgtcccgctgggaacggcggcgttaaccaatccggcttttggcgctgatatctactggcgtgggcgcgtatgggtggatcagttctggtttggtctgaaagggatggagcgttacggttatcgtgatgatgccctgaagctggcggatacgttcttccggcacgccaaagggttaaccgccgatggaccaattcaggaaaattacaacccgctgacaggcgcacagcaaggcgcaccaaatttctcctggagtgccgcgcatttgtatatgttgtataacgattttttccgtaagcaataatttgcaactgctggcggatgcggcgtaaacgccttatccgccctacatgtgcaatcctcctggccggataaaacgcggcaagcgttgcatccggcaactgcaccgcgccactggcggatgcggcgtgaacgccttatccgccctacatgtgtgttcccgtaggtcggataagacgcgacaagcgtcgcatccggcatctgcaccgcgccactggcggatgcggcgtggacgccttatccgccctacatgtgcaattccgtaacctggataaaacgcgacaagcgtcgcatccggcgttatcaccgggcgtattctttttgaatcccatcacaaaccccgcactccccttttcccttttctccggcgacggctaaattagaactcatccgaccacataacaattattttacatactggacaattttatgagctacccgtcgctgttcgccccgctggatttaggttttaccacgttaaaaaaccgcgtgttgatgggctcaatgcacaccgggctggaggaatacccggacggtgccgagcggctggcagcgttttatgccgaacgcgcccgtcacggcgtggcgctgattgtcagcggcggcattgcaccagatttaacaggcgttggcatggaaggtggcgcaatgctcaacgacgccagccagatcccacaccatcgcaccattaccgaagcggtacatcaggaaggcggcaaaatagccctgcaaattttgcataccgggcgctacagctaccaaccgcatctggtcgccccgtccgcattgcaggcccccatcaaccgtttcgtgccccatgagttaagccatgaagagatcctgcaactgatcgacaatttcgcccgctgcgcgcaactggcgcgggaggcaggatacgacggtgtagaggtgatgggttccgaagggtatttgatcaacgaatttctgacgctgcgcaccaatcagcgtagtgaccagtggggcggcgattaccgcaaccggatgcgatttgccgtagaagtagtgcgtgcggtgcgcgaacgcgtcggcaacgacttcattattatctaccgactgtcgatgctcgacctggtcgaagacggcgggacttttgccgaaacggtagagctggcgcaggccattgaagcggcgggcgcgaccattatcaacaccggcattggctggcatgaagcacgtattccgaccattgccacgcccgtgccgcgcggcgcatttagctgggtcacgcgcaaactgaaaggccacgtctcgctgccgctggtaaccaccaaccggattaacgatccgcaggttgccgacgatattctctcgcgcggcgatgccgatatggtatcgatggcgcgaccgtttcttgctgatgcggagctgctgtcaaaagcgcaatcgggacgagccgatgagatcaacacttgtattggctgcaatcaggcctgtctcgatcaaatcttcgttggcaaagtcacctcgtgcctggtgaatcctcgcgcctgccacgaaaccaaaatgccaatccttcccgccgtgcagaaaaaaaatctggcggtggtcggtgcgggacctgctgggctggcgtttgccattaacgcggcggcgcgtgggcatcaggtaacattgtttgacgctcatagcgagattggcgggcagtttaatatcgccaaacagatccccggcaaagaggagttttacgaaacgctgcgctattaccgccggatgatcgaagtgacgggcgtgacgctaaaactcaatcacaccgtgacggcggatcagttacaggctttcgatgaaacgatcctcgccagtgggatcgtgccgcgcactccgcccatcgacgggatcgatcatccgaaggtattgagttatctcgatgtactgcgcgacaaagcgccggttggcaacaaagttgccatcatcggttgtggcgggattggttttgatacggcgatgtatttaagtcagccgggcgaatccaccagccagaatatcgccgggttctgtaatgaatgggggatcgacagtagcctacaacaggctggtggcttaagcccgcagggaatgcagatcccccgtagcccacggcagattgtgatgctccagcgcaaagccagcaaaccaggacaggggttaggcaaaaccaccggctggatccatcgcaccaccctgctctcgcggggtgtgaaaatgatcccaggcgtaagttatcagaagattgacgatgacgggctgcatgtggtgatcaacggcgaaacgcaggtattagcagtggacaatgtggtgatctgcgcagggcaagagccaaaccgcgcgctggcgcaaccgctgattgatagcgggaaaacggtgcatttaattggcggctgcgatgtggctatggagctggacgcacgacgggcaattgcccagggaacacggctggcgctggagatttaaatcgttatttgaagcgccggatgcaacgcatccggcacgtcgcgttaatcaataaacaaggcgggagaaatgccgaatcgcgttgccaattttttagcgtgttccagcgttaatttcctcttcccgctcaaaacgcgtgacaccatagatttactgccaatttccggcagatcggaaagggttaaaccatattgatccataagggtacgaatcacggctataccgccaggcatggcttgagccatggcattaaattccgcaaattcgggcgctgattcttcccacgcggttattttggcacacaccagatccagcaaggggttttcaggatcgttgagcagcagatgatctaccagttccagcgcctgggtgtattgttcctcgttctgaatacccgccagaaaaggtgccacagcagttagcttttctcctgcttgcaagatgtcggcaatcgcaatcattttttccccttagtacgatgaacagcggtaaagaaatcgtattctttatgcgtcataacttcacgtatgtagcacttttgcgattcaaaaaagaccattgctacaacacgtaattcattgcccccaacattgaaaacataatgcttatccagatatttgaagttatccagagatgggaatactgcttttaatgactcaggttttttgaaatatcccttagcaatcgtgttccccagagccaccaactccgttttatgttgcgggtatttttccgcagcatctttcaatgctttttgagttatcaggtgcattcttcatcacgtccgttgacaaattggcaatatgataacatccgttgccagattggcaacggatgaatttatctgtgtgacggaagaataaacgtagaaaaacgctaaacaagagaatgtagacgatggtgacagggattttttgttttatggaagcgcgattccagaactgggcagacattgccggatgcgacgcttgccgcgtcttatccggcctggagtaacgtgctgaacgtaggccggataaggcgtttacgccgcatccggcaggtaactcccaatcttaccgacgacgtcccagcttcaccgctttcagtaccacaaatttattattcgtcgcaatagtggtgcagttgccgaaaatcttcttcagtttatggaagtaatccaggtgacggttggcaacgatatacagctcgccgttgattttcaggcagcggcgggcgtggtggaacatctcccaggcgacgttatcggtcagcgcatgttgttggtgaaacggcgggttgcagagcacagcattaaagcggaaaggctccacgccggagagcgcgttgttgatcataaactcgcagcgatccaacgcctctggcatgttggtttcaacgttcaaacggctggaagcaaccgccatcggcgattcatcgacaaacaccactttcgcctgcgggtttttatcaagcagcgtcagaccaataacgccattaccgcaaccgagatcgacaatctccccttcgagattctctggcagatgttgcataaagaagcgcgcgccgatatcaagcccggtgcgggagaagacattcgcatggttgtggatagtccagtcagtaccttccagcttccagctaacggtctgcggcgcatcggccagctgcggttcattgaaagtgcaattaatcaggcgcgcttttttccatgccagcgtggtggtggttgggccgagcactttttcgaacagttccagcgtggaagtgtgaatgtcacgggccttggcaccggcaataatacgtgtatccgacgtgaccactttgcgcagcgcacgcagttgctgttccagcaatgccagtgttttcggcactttgatcagcaccacacccggctgttgcgggtagtcggcggtgctgtcgagaaacttcacgctcgactcatcaatcccgttgaggcgtaaattctcgcgcgtcgccagttcactgatgtatgagtcgccaatgctgtacggcttatgttccgccagtgcgcagcttaacgcaccaaaggcatcattcaggatcaacaccgggccgcggatttctgtgtcgtccaactgttgcagcaaatattcatccgccgcttcccacgcctgtagcgggttaacgtcatccgtcgccggaaaacgttgtagtgtcagtgaacggaaaccgttgtctaagtggctcatcggccctcctgaatgataaaatttcgacattgcccctgaaaagggtgcgtgagtataccctttttctctttttcgtgggcggttatgagcaatcttacttatcttcagggttatcccgagcagctactttcccaggtgcgaacactgattaacgaacagcgtctgggcgatgtgctggcaaaacgctatccgggaacacacgactacgccaccgataaagccctctggcaatatactcaggatctgaaaaatcagtttctgcgtaatgccccgccgatcaataaagtgatgtatgacaataagatccatgtgctaaaaaacgcgctcgggttacataccgctgtttctcgtgtgcagggcggcaagctgaaagcaaaggtggagatccgcgtcgctaccgtgtttcgcaacgcgccggaaccgtttttgcgcatgatcgtggtgcacgagctggcgcacctgaaggagaaagagcataacaaagcgttttaccagttgtgttgtcatatggaaccccagtaccaccagcttgagttcgacacccgactgtggctaacgcagttgtcgcttgggcagaacaaaatctgaaaatgatgtcaggcgttatcttttctttctttagcgcctaaaatcgacctcccccctttcgttaaggataacgaccatgctgcgcgcatttgcccgccttcttctccgtatttgtttttctcgccggactctaaagattgcctgcttactgttacttgtggcaggagcgaccatccttatcgccgatcgcgtaatggtcaacgccagcaaacagctgacctggagcgatgtcaacgccgttccggcgcgtaacgtgggtttattgctgggggcgaggccgggtaatcgctactttacccgacgtattgataccgcagcagcgttgtaccacgccggaaaagtgaaatggctgctggtaagtggcgataacggacgtaaaaattacgatgaagcatcaggtatgcagcaggctttgatcgctaaaggcgtaccagcaaaagtgatcttctgcgactatgccggattctcaacgctggattcggtagtgcgtgccaaaaaggtttttggtgaaaaccatatcaccattatctcgcaagaatttcataatcaacgcgccatctggctggcaaaacagtacggcatcgacgctatcggttttaacgcgccagacctcaatatgaagcacggtttttatactcaactgcgggagaaactcgctcgtgtcagcgccgtgattgacgccaaaatcctccatcgccagccgaaatatctcgggccttcggtcatgattgggccgtttagtgagcatggctgtccggcgcagaaataatgcgtatctgcgcacgtcgaagatgaaaaaggcgtgctacattgacgacagaatccctttatggagtatccacgcgttatgatacgtttcgctgtgattggtacgaactggatcactcgccagttcgtcgaggccgcccatgagagcggtaaatacaagttaaccgccgtatattcccgcagccttgaacaggcccagcacttcgccaatgatttttctgtcgagcatctgtttacctcgctggaagcgatggcggaaagcgatgccattgacgcggtgtatattgccagcccgaattccctgcatttttcccagacacaacttttccttagccataaaattaatgtgatttgcgagaaaccgctggcgtcgaatctggcggaagtggatgccgccattgcctgtgcgcgggaaaatcaggtggtgctgtttgaggcatttaaaaccgcctgcctgccgaactttcatttgttgcgccaggcgctgccgaaagtcggcaaactgcggaaagtctttttcaactattgccagtattcctcgcggtatcaacgttacctggatggtgagaatcccaacacctttaatccggcattctctaacggttcaattatggatatcggtttttactgtctggcgtcggcggtggcgttatttggtgagccgaaaagcgtgcaggcaaccgccagtttgctggcaagcggcgttgacgcccagggcgtggtggtgatggattacggtgatttcagcgtcaccttgcagcactcaaaagtcagtgattctgtcctggcgagcgagattcagggcgaagcaggatcgctggtgattgaaaaactgtctgaatgccagaaagtgtgcttcgtgccgcgtggcagccaaatgcaggatctcacccagccgcagcatattaataccatgctctacgaagcagagctgttcgctaccctggtggatgagcatctggtggatcatccagggctggcggtcagtcgcatcaccgccaaactgctgaccgagatccgccgccagactggggtgatttttccggcagatagcgtaaaactataattgccaaagtaaaacagtgtaaaaggtatgtaacagaccattgactggctgaatggtctgtcatactttgttacctgcaaaggggagtaacttcattgccggtcgatcgtcattacgatgtgtgaaaaaacacatccggtcaccgggcaacccgaaaggaatacgcagacgtattccttttttgttgtaagtgagaccttgccggaaggcgaggtctatgcataaaaagcagcggctgacgtcttccgacgttggccgtttttttatgtgtaaggaacttctatgaatactgtcggcacgccgttgctatggggcggattcgctgttgttgtcgccattatgctggctatcgacctgttgttgcaggggcgtcgtggggcacatgccatgaccatgaaacaggctgcggcctggtcgctggtctgggtgacgctgtcgttactgtttaacgccgctttctggtggtatctggtgcaaaccgaaggtcgcgccgttgccgatccacaggcactggcctttctcacaggttatctgattgagaaatcgctggcggtcgataacgtctttgtctggctgatgttgttcagctatttctctgttccggcggcattacaacgccgcgtgctggtgtatggcgtgctcggggcgattgttctgcgtaccatcatgatcttcactggcagctggctaatttcgcagttcgactggatcctgtatatcttcggtgccttcctgctgtttaccggcgtgaagatggcgctcgcccatgaagatgaatcaggcattggcgacaagccgctggtgcgctggctacgcggtcatttgcgcatgaccgacaccatcgacaacgagcatttctttgtgcgtaagaatggattgctgtacgccacaccgctgatgctggtactgattctggtggaattgagcgacgtgattttcgccgtggatagcattccggctatcttcgccgtgaccactgacccgttcattgtgctgacctcaaacctgtttgcgatcctcggcctgcgtgcgatgtatttcctgctggcgggcgtagcagagcgtttctcgatgctcaaatatggcctggcggtgattctggtgtttatcggtatcaagatgctgattgtcgacttctaccatattccaatcgccgtctcgctgggcgtggtgtttggcattctggtgatgacgtttattatcaacgcctgggtgaattatcggcatgataagcagcggggtggataatttttaatctgcctaagccgtgtaccctgtcattaacatgagcaccgttttctccctctcccttccagggagagggtcggggtgagggtaatttttcgcaccgatgctggcctgttcccctcaccctaaccctctccccaaacggggcgaggggactgaccgagtccttttttgatgttgtcatcagtctggaagccgcacgttggctttatttttatgtcaaagaaatgtaaccattaagtttcaaaatatgacctctctttaaaatccagcatttttcgcttcccgaagctgtaactttccttatactcgaccttgcaaacactttgttacatcctgaaagatgcgtcgacagaacgcaccagggatgtgcgacaacacaatgaaaggatcgaaaaatgactacgcaacgttcaccggggctattccggcgtctggctcatggcagcctggtaaaacaaatcctggtcggccttgttctggggattcttctggcatggatctcaaaacccgcggcggaagctgttggtctgttaggtactttgttcgtcggcgcactgaaagccgttgcccccatcctggtgttgatgctggtgatggcatctattgctaaccaccagcacgggcagaaaaccaatatccgccctattttgttcctctatctactgggcaccttctctgctgctctggccgcagtagtcttcagctttgccttcccttctaccctgcatttatccagtagcgcgggtgatatttcgccgccgtcaggcattgtcgaagtgatgcgcgggctggtaatgagcatggtttccaaccccatcgacgcgctgctgaaaggtaactacatcgggattctggtgtgggcgatcggcctcggcttcgcactgcgtcacggtaacgagaccaccaaaaacctggttaacgatatgtcgaatgccgttacctttatggtgaaactggtcattcgcttcgcaccgattggtatttttgggctggtttcttctaccctggcaaccaccggtttctccacactgtggggctacgcgcaactgctggtcgtgctggttggctgtatgttactggtggcgctggtggttaacccattgctggtgtggtggaaaattcgtcgtaacccgttcccgctggtgctgctgtgcctgcgcgaaagcggtgtgtatgccttcttcacccgcagctctgcagcgaacattccggtgaatatggcgctgtgtgaaaagctgaatctggatcgcgatacctattccgtttctattccgctgggagccaccatcaatatggcgggcgcagcaatcactattaccgtgttgacgctggctgcggttaatacgctgggtattccggtcgatctgcccacggcgctgctgttgagcgtggtggcttctctgtgtgcctgtggcgcatccggcgtggcgggggggtctctgctgctgatcccactggcctgtaatatgttcggtatttcgaacgatatcgccatgcaggtggttgccgtcggctttatcatcggcgtattgcaggactcttgcgaaaccgcgctgaactcttcaactgacgtgctgttcactgcggcagcttgccaggcagaagacgatcgtctggcaaatagcgccctgcgtaattaattgtttaacccctttcgtctacggcggaaggggttttctcaactttaaacggatcaattccccttttctgcatccgccagaaacgaatgatattcaggccattcataagcagaaaactaccctcaatcatcgtgccgcctatcgaccccgcccagaagttgtgaatcacccagcaacacgttgaaaaccacattacgcagcgcatggtcagccctttacagcagaatagcgcccaggtactgacaatcgtgccgataaccggcaatagttcgacaggatgatggaacttcgcgaggccaattccgccagtcagcacaataaaaatcgccattacccataagctgcgcgtgcgtaaggtaatcaatgtacgaatggcattaaggatggcactggcaccagcgggataggtgcccagaagaaaaaaatgtacgccaataacggcgctatagaccgaaagctgctttttgaagcgacgttcgtcacgattgaaaaatgttgtgataccaatcagaaaggcgatgacacccacgccctgggccagccaatacgcggtcatgataaatccttagcaggtatggaaaagcaaacggcgcttcacattatgaaacgccgttttttattaacaactcatttcgactttatagcgttacgccgcttttgaagatcgccagttcgcggaagtcgttacgctcgttacaggtttgcttaccgttggcaaactcaacgatggtgtcgataaattcttccagcaactgcggcatcgctttaccgtggatcaactgacccgcgtcaaagtcgatccagtgttttttcttcgccgccagttcactgttggtggcgattttcaccgtcggcacaaatccaccatacggcgtgccacgaccagtactgaacagcaccatatggcagcccgcacccgccagggcgctggtcgctacggcatcgttacccggcgcacttaacaagttcagccctggcgttttcagacgctcgccgtaacgcagcacgtcaaccacgacgctggaacccgctttctgggtacagccaagtgatttgtcttccagcgtggtgataccgcccgctttgttccccggcgatgggttttcatagatcggctgatcatgggcaataaagtactgtttgaagtcgttgaccatggtgaccagtttttcaaacgttgcttcgtcgcggcaatggtccatcagcaactgctctgcgccaaacatctccggcacttcggtcagtacggtagtaccgccgttagcaatcacgtagtcagagaaacgccccagcatcgggttagcagtaataccagaaagaccgtcagaaccaccgcactccagaccaaacttcagttcgctgagtttgcctggctcgcgtttatcgttgcgcatcacgttatacagctgatgcaaatgctcgattccggcttcgatctcatcatcctgctgttggcagatcatgaaatgaacgcgttcaggatcgatatcgcccagcgtttcacggaatgcggcaacctggttgttttcacagcccagaccaatcaccagcactgcgcctgcgttcgggtggcgcaccatgttttgcagcatggtgcgggtattaatgtgatcgtcgcccagctgtgagcagccgtaggtgtggctgaagaggaacacgccgtcagtaccttcggcgttgttggtctctttcagaaaacggttctggatctgccgcgcgatgccgttgacacagcccacggttggcaggatccacagctcattacgcaccccgacatcgccgttagcgcgacgatagatctgcacttcacgatctgccgcttgcgcaggcagatcctgaaaatcaggttgatagcgatactgatccagatcgctcagattcgtgcgcgtattgtgggcgtgaacgtgaacacctgccgcaatatccgccaatgcataaccaatcggcaggccatatttgatgacattggccccttttgcgatatccgttaacgcaaatttatgtccacgagcaacatcctggcgcagcgtaacagtctggttatcgacactgacttctgtgccttcagccaaatctgctaaagcgaccgcgacgttatccagcgcatggatcttgatgtattgcatatcaaccccagaccttagttcagttcaatggcgaagtagtcacgcgcattgttaaagcaaatatttttcaccatctcgcccagcaggttgatgtccgccggtgcttcgcccgcttccacccagcgaccgatcatctggcacagaatgcggcggaagtattcgtgacgggtgtatgacaggaagctacggctgtcagtcagcataccgacaaagcggctcagcagaccgagctgcgccagttgggtcatctgacgttccataccgtctttctgatcgttaaaccaccagccggaaccgaactgcattttgcccggcataccttcgccctggaagttaccgatcatggtgcccagcacttcgttatcgcgcgggttcaggcagtacagaatggttttcggcagcaggttttcttcattctgcttgctcagcaacttagacagctcttccgccatcggacggtcgttgatggagtcaaagcctacatccggccccagcagtttgaactgacgcaggttgttattacgcagcgcgccaatgtggtactgctgtacccagccgcgacgtgcatattcggcaccaaggaacaccagtaccgcagttttgaactgcgccacttcgtgctcgctcagggtttcgccagccagacggcgcgccagaatgctgtccagttccgcttcgttcgcttcagcaaacatcaccacatccagcgcgtggtcagacactttacagccgtgagcggcgaagtgatccagacgtttggtcagggcagtttgcaggtcagcaaagcggcgaatgtcggtatcggaaacttcgcccagcttcgccatgtagtcgttaaaggtcgcctgttcgatgttgaaggctttgtccggacgccagctcggcagcactttgatggtgaaagagccgtctttggcgatctctgcgtgatgctccagagaatcgatcgggtcatcggtggtgccgaccattttcacgttcatctgctgcatgatgccgcgcgcggagaagttatcctgcgccagcagttcgttacattcgttccagatttcatcggcagttgacggagaaagcaatttgccagtgataccaaacggacggcgcagttcgaggtgcgtccagtggtataacgggttgccgatagtgtgcggaacagtcgccgcccaggcgtcaaatttttcacggtcagacgcatcaccggtacacagacgctcggccacaccgttggtacgcatagcgcgccatttgtagtgatcgcctttcagccagatgtcatacaggtttttaaaacgatagtcttccgcaatctgctgcggcggcaaatggcaatggtaatcgaaaatcggctggtcttttgcgtagtcgtgatacagacggcgggcaaattcggtatctaacaggaaatcttcagtcataaacggagtcattttcgtcttcctctcaacgagtgagctagcttgcttatggtgcgatgctgacaaagttatcacaccaatttccagagtccgaagatattttcgtgagttagatcaataaacgtagttaaaaaaattactctcaaagtggtaaatctcgctgcaggccgcgccagtactggccttgctgtcgtcaggtaatgtccctacaaatattcccacatttgtgatggctctcaccttttaaagttgtatgacaagttatctttctgccgtcgcaaatcataagtcgacggaatgcaaattgccgattcattcatttgttagatgaatcgggttaaccggtacggaagccgaattagcacgaaactttcatggcaacgttcggggcgtgccggttttttttcggttacccggtcgtaactaacatcttcagcctctggcgggatgatggccgcgcttcctgcggatataacaaaacgatgaggttttacatgcgtaaaattaaagggttacgttggtatatgatcgcactggtgacgctcggcaccgtgcttggttacctgacgcgtaacactgtggcggcagctgcgccaactctgatggaagagttaaacatctccacccaacagtattcctatatcatcgcagcctattctgctgcttatacggtcatgcaaccggtagcaggttatgtactggatgtgctgggtacgaaaatcggttatgcaatgtttgctgtgctgtgggccgtgttctgtggtgcaaccgcgctggcaggtagctggggtggcctggctgttgctcgtggtgcggtcggtgccgcggaagcagcgatgatcccggcgggtctgaaagccagctccgaatggttcccggcgaaagagcgttccatcgcagtaggctactttaacgtaggttcttcgattggtgcgatgattgcgccgccgctggtggtatgggcaatcgtaatgcacagctggcagatggcatttatcatctccggtgcattgagctttatctgggcgatggcatggctgattttctataaacatccgcgcgaccagaagcatctgaccgatgaagaacgcgactatattattaatggtcaggaagcccagcaccaggtgagcacggcgaagaaaatgtccgttggtcagatcctgcgtaaccgtcagttctggggtatcgcgctgccgcgtttcctggcagaaccggcctggggtacttttaacgcgtggatcccgctgttcatgtttaaagtttacggctttaacctgaaagagatcgcgatgttcgcctggatgccgatgctgtttgctgacctcggttgtatcctcggtggttacctgccgccgctgttccagcgttggtttggtgtgaacctgatcgtttcccgtaagatggtcgtaacgctgggtgcagtgctgatgattggcccgggtatgatcggcctgttcaccaacccgtatgtcgcaattatgctgctgtgtatcggtggttttgcccaccaggcactgtctggcgcgctgattacgctctcttccgatgtgtttggtcgtaacgaagtggcaacggcaaacggtttaaccgggatgtccgcatggctggcaagtacgctgtttgcgctggttgtcggtgcactggctgacaccatcggcttcagcccgctgttcgcagttctggcagtgttcgacctgttaggtgcgctggttatctggaccgtgttgcagaacaaaccggcgattgaggtggcgcaggaaacacataacgatcccgcaccgcaacattaacgtttcgtgtaagttttagtttcccttcaaagccgccttctcaggcggctttttcatcactgcgagtagagctaaactcgcaaaagtggtataacaaatatagtctgccgtatcatgcctggagcgcatatggaaatcactgaaccacgccgtttgtatcaacaacttgccgctgacctgaaagagcgcatcgaacagggcgtctatctggtgggtgataaactgcctgcagaacgctttattgccgatgaaaagaacgtcagccgtacggtagttcgtgaagccatcatcatgctggaagttgaaggctatgtcgaagtgcgtaaaggttcaggtattcatgtggtttccaaccagccgcgccatcagcaggcggctgacaataatatggaattcgccaattacggtccgtttgagttgcttcaggctcgccagctcatcgaaagtaatattgccgaattcgcggcaactcaggtaacgaaacaggacatcatgaaactgatggccattcaggaacaggcgcgcggcgaacaatgcttccgtgattccgagtgggatttgcagttccacattcaggtcgctctggcgacgcagaactccgccctggcggctatcgtggaaaaaatgtggacccagcgtagtcataacccgtactggaaaaaactgcacgaacacattgattcccgtaccgtcgataactggtgtgatgaccacgatcaaatcctcaaggcgctgattcgcaaagatcctcatgctgctaagctggcaatgtggcagcatctggaaaacaccaagatcatgttatttaacgaaaccagcgacgacttcgagttcaatgccgaccgctatctattcgccgaaaacccggtggtgcatctcgatacagccaccagcggcagtaaatgaaattcctgtccgacaggcgctgcaatgcgcctgtttgtctcgtcggtaagcgaaaagtataaagtgtcagcctgtgtaaatcctctcgccaccctcccctgcattcagcaaaatcagactccacggacatgtaattttgataacgaacaacgttgacctttgttacaattagattcaatttgaatttatgtttttgaatgctttcttatctcacgatttaacagggaatagttcaggctgtgttgatgtatcaaacccgcagaacataccaaaacagcaataacattgcggtagtgcatcttttaaaaccagcgtggcgttaaccgattcaccaggaataatgaatggaacttttgacccaattgctgcaagccctgtgggcgcaggattttgaaaccctggccaatccatcgatgattggcatgttgtattttgtcttgtttgtaattttgttccttgaaaacggcttgcttccggcggcctttttaccgggcgacagtttactggtattggtcggcgtgttgattgcgaaaggcgcgatgggctatccgcaaacgattctgctgctgaccgttgccgccagcctcggctgctgggtcagctatattcaggggcgatggctgggcaatacccgcaccgtacaaaactggctatctcatttacccgcgcattatcatcaacgcgcacaccatctttttcataaacacggtttatcggcgctgttaattggtcgctttattgcgtttgtcagaacactgctgccgacgattgccgggttatcagggctgaataacgcgcgctttcagtttttcaactggatgagcggtctgctgtgggtattgatcctgacaactctgggttacatgctcggcaaaacgccggtatttttaaagtacgaggaccagctgatgtcatgcctgatgctgctcccggtggtgctgctggtgtttggcctggcaggttctctggtcgtgttatggaaaaagaaatatggaaatcgggggtaagggatgcaaatacctcgcatgtcgcttcgccagctagcctggtccggcgctgttttacttctggtcggcacgctgttgctggcctggtccgcggttcgccagcaagagtctacgctggcgattcgtgccgttcatcaaggcacaacgatgccagacggtttttcaatctggcatcaccttgacgctcatggcattcctttcaaaagtatcacccccaaaaacgacactctgttaattacatttgactccagcgaccagagcgccgccgcaaaagcggtcctcgacagaacattgccccatggctacatcattgcgcagcaggacaataacagtcaggctatgcagtggctgacccggttacgggataactctcatcgcttcggataacttcctgttatccgaaacatatcactcactttggtgatttcaccgtaactgtctatgattaatgaggcggtggttaacactaccgcttcgttgtctggacaatcgttcctttgtaataggtccgaatcacaatggaaggttcaagaatgaaataccgcatcgctttagctgtttctctctttgctcttagtgccggtagttatgccactaccctgtgtcaggaaaaggagcaaaatatccttaaggagatcagctatgccgaaaaacaccaaaaccagaatcgtattgacggtctgaataaagccctgagtgaagtccgggccaactgttcagatagccagctgcgtgccgatcatcagaagaaaatcgcaaagcagaaagatgaggtggcggaacgccagcaagatttagccgaggcgaagcaaaaaggcgatgccgataagattgccaaacgcgaacggaaactggcagaagcgcaggaagagctgaaaaagctggaagcgcgcgactactaactcacaatagtcactacttactcacctggagaaaactatgtcgaaagaacacactacggaacatctgcgtgctgagttgaaatccctttccgatacgctggaagaggtgcttagctcatctggcgagaagtcgaaagaagagttgagtaagattcgtagcaaagcggagcaggcactgaaacagagccgttatcgcctgggtgaaaccggtgatgccattgccaaacaaacccgtgtcgcggcggcgcgtgccgatgagtatgtgcgcgaaaatccgtggacgggcgtgggcattggcgctgcaatcggtgtagtgctcggcgttctgctgtcgcgtcgttaattatggcggacactcatcacgcacaagggcccggtaaaagcgttctgggcatcgggcagcgaattgtttctatcatggttgaaatggtagagacacgtctgcggctggcggtggtggagctggaagaggaaaaagcgaatctctttcaacttttactgatgctgggcctgacgatgcttttcgctgcatttggtcttatgagcctgatggtgctaattatttgggcggttgacccgcaatatcgcctgaatgcgatgattgccaccaccgtggtgttgctgctactggcactgattggcggtatctggacgctacgtaaatcgcgtaagtctacgttgctgcgccatacacgccatgagttagcaaacgatcggcagctgctcgaggaggagtcccgtgagcagtaaagtcgaacgtgaacgacgtaaggcgcaactgcttagccagatccagcaacaacggctggatctttccgccagtcgtcgtgaatggctggagacaacaggcgcttacgatcgtcgctggaatatgctgctaagtctgcgctcctgggcgctggttggcagtagcgtgatggcgatctggacgattcgccatcctaatatgctggtccgctgggccagacgcggttttggcgtatggagcgcctggcgtctggttaaaacgaccctcaagcagcaacagcttcgcggttaacttccctctggccggagccattccggccttatccctcaaattttttgaagatttttgacagttttccttgctaacaatcatcattcaccacgtttatgattctctccatcgacagcaacgacgctaataccgcgccattgcacaaaaaaacaatcagcagcctgagtggcgcagtggagagtatgatgaaaaaattagaagatgttggtgtactggtagcgcgcattttaatgccgattctgtttattaccgctggctggggaaaaattactggctacgcgggtacccaacaatatatggaagcaatgggcgtcccgggttttatgctgccactggtgattctgcttgagtttggtggtggtctggcaatcctgttcggtttcctgactcgcaccacagccctgtttactgcgggctttacgctgctgacggcatttttatttcacagcaactttgctgaaggcgtcaactcgctgatgttcatgaaaaacctgacaatttctggcggattcctgctgctggcaattaccggtccgggcgcgtatagcatcgaccgcctgctgaataaaaagtggtaagcacgcgctatacttaacgataaaaaacgaggaggaagctcctcgtttttgctattggaggagagaaaaatgggtcaactgattgacggcgtctggcatgacacctggtacgataccaaatctaccggcggtaaatttcaacgttcagcttccgcatttcgtaactggctcactgccgatggcgctcctggccccactggcacaggcggttttatcgcagagaaagatcgttatcatctctatgtttcactcgcctgcccgtgggcgcaccgcacgctgatcatgcgcaaactcaaaggactggaaccgtttatttccgtttccgtagtgaacccgctgatgctggaaaacggttggacctttgatgacagttttccgggagcaaccggagacacgctctatcaaaatgaatttctgtatcagctttatctccacgccgatccacactacagcggacgagttactgttcccgtgctgtgggacaaaaagaaccacaccatcgtcagcaacgaatcagcagaaatcatccgcatgttcaataccgcgtttgatgcgctgggcgcgaaagcgggtgattactaccctccagccctgcaaacaaaaattgacgaacttaacggctggatttatgacaccgttaacaacggcgtgtataaagctggttttgccaccagccaggaagcttacgacgaggcggtggcgaaagtgtttgaatcgctggcacgactggagcagattttaggccagcatcgttacctgaccggcaaccagctaaccgaagccgatattcgcctgtggactacgctggtgcgttttgatccggtgtatgtgacccacttcaagtgtgataagcaccgcatcagcgattacctgaatctgtacggttttctgcgcgatatctaccagatgccggggatcgccgaaacagtcaatttcgatcatatccgtaatcattacttccgcagccataagaccatcaaccctacggggattatttcaattggtccgtggcaggatctcgatgaaccgcatggacgagatgttcgcttcggttaaaaaaaggcaccttacgaggtgcctctgataattagctaagtgcatgttgttcatgtcggatgtggcatgaacgccttatctgacatacaaaacattgtacattcaatagattgcataacccgcgcagaccagataagcgtagcgcatctggcgattttgcgcttgtcatcagtcttagcgcgccttcacggcactttattaattccttgaacgaatatttactgccatttcattcacgtctattcttaatttgctgctttaaaaacaagtgattgagcaaaattgaggcaaaaatggactggtatctgaaagtactaaaaaattatgtcggtttccggggtcgtgcgcggcgcaaagagtactggatgtttattctggtcaacatcatctttacgttcgtgctggggctgctggataaaatgttaggctggcaacgcgctggtggcgaaggcatcctgacgacaatctacggtattctggtgtttttaccgtggtgggcggttcagttccgccgcctgcacgacaccgaccgctcggcgtggtgggcactgctattcttaatcccgtttatcggctggcttattatcatcgtctttaactgccaggcgggtacgccaggcgaaaaccgctttggaccagatccaaaactggaaccttaaaacaaatctgctcgccggatgtctgactcatccggcttttatcattatgttgatgaatgaataatttactaatgtttatttaaaatatttcaatgtcgttatataaattacctataaaaaataaccatgtatttatcttaaatatcaaaacctttataacatccgaaaaagaaagatacgaatagcatttacacaatacccggaatagactttcgtcacttttaattaaagggatgtttttatgcagtggtatttgtccgtattaaaaaattatgttggtttctctggtcgcgcacgtcgtaaagagtactggatgtttactctgattaacgccatcgtcggcgctattatcaatgtcattcaattgattttaggtctggagcttccatatctgtctatgctttatttgctggcaaccttccttcccgtccttgcgcttgctatccgtcgcttacacgataccgaccgttcaggtgcctgggccttgctcttttttgttccgtttattggctggctcgtgcttctggtttttttctgcacagaaggtacttctggcagcaatcgttacggaaacgatccgaagtttggttcaaattaatcttagaattggggcgatatttcgcccctttttattaacaataataaatattattttccgttaaaaagtttgggaatttcccgcagacaccaggatttcgcttcccccatactgtcacgacgccaggccataataatatcgatctcgctggtcgattccgggctgacgacacgcaaccgcccttccgcaatatctttttcgaccataggatacggcatcgtcgccacgccaagccccgccagtaatgcctgacgtttatcttcaatcgtgctcaccgttaagcgcggctgtttgtccagcagctgtacggtcaacaccgggcgctcacgagcggtatccgccaccgcaattccacgatatttcacacgcgtcacttcagataacggttccggctcctgatgaatcgggtgatcaggcgcggcaacgtagacgttcattaacgtatagagcttgcgcgagttgatctccgacgaggaacgaaaatgcatatccggcgcgataacaatatccgcccgcccctgctccagccgttcccacgcccccgccagcacttctgtgatgattgccagttgggtattggcttttgccgccagtttgtcgattaacgggaaaaaggcaggtgtcggtaccagcgcttcggtcacaatggtgagatgcgtttcccaaccgcgcgcgagagcttccgcatcagtagtcagtttatctgcggcttccagcaaaacgcgccctcgctccaacaacatcctcccgacattggtgaatttggtacgatggcccgagcggtcaaacagcaccacatccagctcttcttccagtttttgcatggtgtagctaagtgcggaaggcacgcgtcccagctcatccgccgccgccgcaaaactgccccggcgatcgatcgcatccataacccgtagtgcttccagcgttaatgccctttctttggccatttcgttctcattcaggaaatttgaacataccgggcagaatatctggctaacaatgtagcgtccagccccttaccataaaaggaagtaaagagaggtcaagaattatgattactacccgaactgccaggcagtgtggacaagcagactacggatggttgcaggcccggtatactttttcctttggacactacttcgacccgaaattgttaggctatgcctccctgcgtgtgcttaaccaggaagtgctggccccaggtgccgcctttcagccgcgaacctatcccaaagtcgatattttaaatgtgattctggatggagaagcagagtatcgcgatagcgaaggcaatcatgttcaggccagcgccggagaggcgttgctgctctctacccagccgggtgtcagctatagcgaacacaatctcagcaaagacaaaccgttaacgcgaatgcagctttggctggacgcctgcccgcagcgagagaatccgctgattcaaaagctggcgcttaatatgggcaagcagcaattaatcgcctcgccagagggtgcgatgggaagcctgcaattacgccagcaagtgtggctgcaccatatcgtgctcgacaaaggcgaaagtgcgaatttccagttgcatgggccacgcgcgtatttgcaatcgattcacgggaaatttcatgcgcttacgcatcatgaagagaaagcggcgctgacctgcggtgatggggcgtttattcgtgacgaggctaacattacgctggttgccgattccccactgcgcgctttgctgatagatttgcctgtctagttgtttttacagggagatgatgatgagtaaaaaattggccaaaaagcgccagccggtgaagcccgtggtggcgaaagaacctgctcgcaccgccaaaaattttggctatgaagagatgttgagcgagctggaagctatcgtcgcggatgctgaaacgcgtttagccgaggatgaagctaccgcgtaaagacaggttgccggatgcggcgaaaacgccttatccggcctacaaaatccaacaacattaacgaattaaacaacccgtaggccggacaagatgcgccagcatcgcatccggcacgatccccaaaacctggcgtttatctggccttgctcgccataatctcgataatctgccgatccgtttgctgcatcgaatggcttgctaacgcacacaggttggcaatcgactgctcaacatcatgcgccacaatcccttcattgccggtcacggcggtatcatccagcgccattaacaccgctttccacgcagccgaagcactggtcgaaaccttcatcgcgcagctgttcgacgcaccatcgcaaatcatgccgctgacatcgccgatcatactgctgatcgccatcgagatggtttcataacgcccatccaccagccatgccatcccggcggcggcccccattgctgcggtcgttgcggcacacagcgcagacaaacgcggtaactggttatggatgtaaattgcgctcaaatgcgaaagcatcagcgcacgcgccagccgttcatcatccgctccgaagtgttctgctaccaccaccacaggcattgttgcggtaatcccctggttacccgagccggagttactcatagccggaagcgtagcgccgcccatacgcgcatcggatgccgcgctggtacgaatcacaatggatgaagagagatctttcgccagcaaaccgcgctcgcactgtttttccagcgtcgcgccaatatgcagcccccacttaccgctcaaaccttcctgcgataacgcacaatttagcttcgcggaatcgagaataaagcggatcgccgcaaacgggacttcattgacgaacttcaggatctcagccagcgtcgttctggaaagcaccgtcagcggagactcttgctcgccctctgccacacacgcctgctgggtaaacaccacaccatcgtgcgtctcgatatgcacaatgttggtatgcccgccgacgatggtgacacacgcccacttctcaccgttccagactttggcgcgtgagaagaggatttcatcgcaaggttcctggatcttaacggagactttccccgccgccagcagtgctttggcatcggcaattgcctgcgctgttgcgtctttcagcacttccagcccggcgttggcatttccacctaacgcccccagcgccgccgcaatcggcagccccaccattcccgtgccgggaacggtgacgcccagaccgttcttcatcagatttggcgaaacccaggcttctacacgttcaaccggaccttccagttctgccgcagcaaccgccgccgccagcgccagtgaaatcggttcagtacatcccagcgccggttttacttcctcctgaacggcgaggatgtaacgctgccataacggatttaaagtcgaatcaaacatattaaaaaccttaaaatttcaggtaaatcaagaaaatgccaggaacggagaaacacacagcaacaaaccagtgacgataatcaggtacagagacatccctttgtatttgtgcaatgctggtactttgtaaaccagccacgccgggatcaggcaccctaccatgccgaaaatcgggctacagatagaggtgaagctcaacaccggtgcgttcagtacgatggcgctccaggccagcaaaatggcgaaaatcatgatgccgcgctgaacgagattttcgttaatcttctcggcaggcatcttgcgacgcaggatgttcattacgatcccttgcgttgcttcgcgaaagcctaaatagacgccaaagaatgcagtcatgacagcaaagatattgagaatgacgctgaccactttcacccacgctgcgccgtcaccgctaataaactgtgcggcaatcgccagcgcggaaatattctgctcataggcttttaccgcttcgtcatgtcccatcgccagcgtgaacgacacggcgtagaaaaagacggtgacaaacaaaatgccaaacgcgatattcattgcccgcaatgctttatgccgcgccacttcaattgatttttcccgcgagcgataagagatcaccatcggacttaacgtctggataaacagaatcgacgtcagggtaaacggcagcgtaataatggcgtttttcaccagcagccccagcggcggtagcgaaccgacgttatacagatgccacattcccaccatcgacacgcccagcgccgcgaccaccagcagcttggtcagcaccatgccggtcgaaattttgaataacaatttctcgccgcgtgaggagatcgccaccagaatgcaaatcagtaccagaccataaaagggactgtctgacagcaacccttccgtcacgccgaaggtatgcaggtaggaagcactatcgttggtgatggcggtggaatagacgaacatccaaatcaccagcattacgaaatagagcgcacctaacaggatgccccagtttttacctaaataaccgctaatgacgctcgggtaatctttacattctggtgattctgccagcgtattaataaacaatcgctgaaacagatacattgccgggtaaccaatcaccgatgagagcaaaaatacccacaatcccatcaaaccgacctgcaccgggagaaaaacaatccccgcgccaatcgccatcccgatactcataatcacccagccggtgtcagtactgtcgaatttgatcgcttctcgccactcgctctcactcattccagcacgacccgccggggtcgaagcgtctgcaatgacgcctttattcgatgcaatttccataatttctcgctcaatattttgtagggcttattatttttttccgagccgcatcaaggcgatatgcggtctacgtttttgcaggcgagttattagaataaagaaatgatacgcgcgaggtcagagaaaatcttcacaatcaagactttgaaataacggagatggataagaattttctactaaattaatcgcaggagaatattcattctctatttgcggcagatcacaaaaaaaaggtgcacatttgtgcacccaaggatgaaagctgacagcaatgtcagccgcagaccactttaatggccagtcctccgcgtgatgtttcgcggtatttatcgttcatatctttgccggtttcatacatcgtctcgatcactttatcgagtgaaacacgcggtgccgaggtgcggcgcatcgccatccgcgcggcgtttactgctttcacggcattaatggcattacgttcaatgcacgggatttgtacctgtccggcaaccggatcgcaggtcagcccaaggttatgctccatcgcgatttccgccgcattgcatacctgcgccggactgccgcccagtagttcagttaaccctgccgccgccattgaacaggccacgccaatctccccctgacagccgacttccgcgccagagatggaggcgttcattttatacagcgcgccaatagcccccgcggccagaaaatagcgggcaattgaccgctcgtttaccggacgacggaacttatcgtaataagccagtactgccggaataatgccgcacgcaccgttagtcggtgccgttaccacgcgcccgccagctgcgttttcttcactaaccgccagcgcgtacatgttgatccagtcgatgacattcatcggatcgttagagatgttatcgctggaaaccagctgacgacgcagcgctacggcacggcgcggcacattgagcggaccaggcagcacgccttcagtgttcatcccacgttcaataccgtcatgcatcacttgccagatacgggcaaaaccggcgtcaatttccgctttgctgcgcagcgctagctcgttgtgcatcatcagaccagatatagacaggccgttgtaatcacacattttcagcagttcacctgctgagtggaaatcgtaaggtacggacgtttcgacatcgtgcgacaggccgaagtgttcttcttcgacaataaacccgccgccgacagagtaataggttttacttaatagctcttcctgtcccttccaggcagtgatccgcattccgttctcatggcgaggcaacatttcgggatggaagataatgttctttgctacaggaaaatcaacaatatgcgcaccagatgccactggcagccgcccgctgcgcgttactaactctataaatgcagggatctcatcaatgacaacatcctgcggactgtttcctgccagtcccatgatgatggcgacatccgtggcatggcctttgcccgtcagtgacaacgacccgtacagatcgaccacaatatggctcgtcgcggttaataagccgctactttccagccgatcaataaaactttttccggcattcattggccccacggtatgcgaactggagggaccaatcccaattttgaaaatatcgaatgcactaatcatatccacaccctcggattgccgttcagtgaagtggagcggaacgaccttacgaccgtcccgctcacgaggctttacgcactacgtactgcgatggcttcaatttccagcttcacatctttcggcaaacgcgcgacctgcacacagctccgggtcggataggtcgcctgatgctcatcgaagaactgcttatagacttcgttgatggtggcaaaatcattcagatcggtgataaacacggtcatcttgatgatatcgcccacgctcagcccggcagcaaccacgatcgctttgacgttttcgaggcttaaacgcgcctgatcttgcacatcagccgggatctcaccggtctgtgggcaaaccggtatttgcccggaggtgaagaccatgctgcctaaatcaacgccctgaacataagggccgattgcgcctggggcacgttgcgtttcgataatctttttcatacatcctccggcgtcagagcgcctgggtaaaggtacgtgaaataacatcctgttgctgttcacgggtcagtgcgttgaagcgcacggcgtagccagagacacggattgtcaggttaggatatttttccgggtgctcgatggcatccagcagcatttcccgattcattacgttgacgttgaggtgttgaccgccttcgacatccgcttcgtggtggaaatacccatccagcaggccgacaaggttggttttacgtactggatcttctttgcccagcgccgcaggaacgattgagaaggtgtacgagatcccatctttggcgtaggtgaacggcagtttcgccaccgacgtcaatgaggccacggcacctttgcggtcacgaccatgcatcgggttagcgcccggcgcgaacggtgttccggcgcgacgaccgtccggcgtattaccggttttctggccgtacaccacgttagaagtgatagtcagaatcgactgggtagggacggcgttgcgataggttggcagcgctttaattttcttcataaagcgttcaaccaggtcgcaggcaatgctgtctacgcgctcgtcgttgttgccgtactgcggatattcaccgtcgatttcaaagtccaccgccaggccgttttcgtcacggattggtttcacgcgggcatatttgatggcagacagggagtccgtcgccaccgacaggcccgcgatgccgcatgccatagtgcgatagacatcacgatcgtgcagcgccatcagcgaagcttcgtagctgtacttgtcgtgcatgtagtgaatgatattcagcgcgctgatgtactgcaccgccagccagtccatgaagtgatcgaggctgtccatcactttgtcgtaatccagcacgtcgtccatcagcggtgctgttttcggcccgacctgaatcttcagcttctcgtccaccccgccgttaattgcgtagagcagcgttttcgccaggttagcgcgtgcaccaaagaactgcatttgcttaccaatcaccattgggctgacgcagcaggcaatcgcgtaatcgtcgctgttgaagtcagtacgcatcagatcgtcattttcatactgcaaggaagaggtgacgatcgacacctgcgcggcatattttttgaaggcaatcggtaattcttccgaccaaagaatggtcaggttaggttccggtgccggccccatagtgtgcagggtgtgcaaatagcggaaggagtttttggtcaccagcgtacgaccgtccagccccatcccgccgatcacttccgtcgcccagattgggtcgccggagaacagcgaatcaaattccggtgtacgcaggaagcgtaccatacggatcttcatgatgaagtgatcgatcagttcctgtgcctgctgctcattgagtacgccagctttaaagtcgcgctcaatgtagatatcgaggaacgatgccgtgcggcccagcgacatcgcgccgccattttgcgatttcactgccgccagataagcgaagtagagccactgcaccgcttcctgcgcattctgcgccgggcgagagatatcaaagccatatttcgccgccatttcctgaatctgcaacagcgcatgacgatgctctgccagctcctcacgcagacggatggtggcttccagatcctcgcctttttccagacgagactggagatcggcaaattgcagttcgcgttcacgtaccagataactgatgccatacagcgctacgcggcgatagtcaccgataatgcgcccacggccatagccatctggtaaaccggtcagcacgccagatttacggcagcgcagcatatccggtgagtaaacatcaaatacgccctggttatgggttttacgcagatcggtaaacagatattcaaattcactgtccatttctcggccataggcgtggaatgaacttttaatcatattaatgccaccgaacgggtgtagcgcacgtttcaacggcgcatccgtttgcaggccaacaattttttccagcggctggttaatatatcccgcatcatgagcggtaattgtggtggcaatattggtatcgaaatcaaccggcgcgtgggttgcattttcgatacggatgccttccattactttttcccacaattccgtggtggcaggcgtcgcttcggcgaggaaagattcatcgccttcatacggtgtatagttatgttgaataaaatcgcggacattaatttcgtttttccagtccgtacctttaaagccaagccatgcgtcggcgtacagcttatcgctggtatcaatatctaccttcatgaaaaataatctctctacaatacttcaactaaattatgcaaattctgcgggcgcgttaactttgcctaaatgaatggcatccaaagcaatcattttttcttcgttagtcggaataacggcacaaatgacacgcgcattttcactggaaacaattcgctcaccacaggagttagagcgattattcatttctgtatcaatctctaagcctaatacagccaaatgttccatgaccagacgacgaattaagcttgaattctctcctattccgccggtgaatataattccatccaggcgacgtaatgaagctgcgtgtccggcaatatgacgggcaattcggtgaacaaaggttttaattgccagttgcgcgcgttcgtgaccttcatgccaggctttttccagaacacgtaaatccgaagaaagaccggaaatacctaataatcccgactctttattcactacgcgttccaggtcacccaggctctggttggtttggctggcgacccaggacatcgcaccaaagtcgacatcgccactgcgggtacccatcatcaagccttccagcggcgtcattcccattgaggtatcaacactctgaccgttgcgaaccgcgcagattgacgcgccattgccaagatgcgccacaaccaggccggagtcatcttccgccagattcagcagcgaatgtgcgcgctgggaaacatagcggtgcgacgtgccgtggaaaccataacggcgtacacctaactcttcataatatttccacggcaggccgtataaataagcttccggagccatcgtctggtggaaactggtatcaaataccgccacctgagttacgcccggaaataattgctgcgccgattcaataccacttaaattggcgtaattatgcaggggtgccagtggagaaacgcgacggatattatcaatgacttcatcggtaataatggcggactcggtaaaaatactgccgccgtgagcgatgcggtggccaattaaggccacactgtcatttaaattccgtttttccagttcaaatgcaattgccttcaatgcaccttcgtagctgtggtgagccagcggtgctggctctcccccatttacggataagaatgcattttccgagttaataccgtcggcaatacctgacattaatacttcacagtcgctggcatcgagcacggaaaacttaatcgaagacgaaccacagttaataaccaaaacaaccggaaattcattcatctcttttctcatcctgagttacggattaaaacagtttgtatacgatgttcaggatggtcagcagaccaatcacggtaacaaacacgttatccagacgaccacggtatttcgccagagacggcgctttacggatggcatacatcggcaacaggcacagcagggatgcgataatcggtgcgcccatggcttcaatcaggtcaaggatgttcgggttggcgtaggcaacaacccaggtggagcccatgatgaagatcatgctgatagtgttcagtttacccagcgacactttagttttgtcgcctttataaccaaacttcaggaccaggccattcagaccttccagcgttcccagatagtgaccgaagaaagatttgaagatagccacgagtgcgatgatggaagccgcatattccagtgtaatcgcgaacgttgttttggtaccggtcatggacgcaaagtggttagccagataagaaagcactggaatattctgcgctttggcttccgccatgttggccggagacagagtaaacaggcagctaaaggcaaagaacatcaccactgcaaccatcagcatgctggcacgagaaatgatttgggaacatttacgttcggtgaagtcgcgaccgaagtctttctcatactcttcacgcttagaaaccacgaaggaagagacgattggcgagaagttaaaggagaaaaccatgatggaaatccccagccagacagtgatcaggataccgtcatgaccggttaacgacagcgaaccgaggtcaacctggtcgataactgcagagttccagtaagggatcagcgacaaagaaatcagcaccaggctggcgataaacggccataccaggtagctcatcactttaaccatcagatccttaccaaaccagatgacgaaagccatcagcagcaacaggaacagcgccacaaagccgcgattcagcggtgcaaagccgagctggttttcccagaacgtcataaaggtattggtaatagtaacgccataaatccacagcagtgggcaaatcgcgaagaagtacaggaacgtgataaccacgccgccagttttaccaaaatgctcttccaccgtttccgtaatgttgccggaagggttagagccagaaagacacagacgcgccagcgcccggtggcaataaaacgcgatggggtatgccaataccaacatcagaagaatcgggatcagtccgccaaaacctgcgcggatagggaagaacagcaccccggcgccgattgccgtaccaaacaagcctaacgtccatgtggtatctgatttacgccaggacgattgttttgtctggctggatacaatgctatctgaagtactcatatcctatcctcaacgaattaattaagcgtcaacgaaaccggtgatttgagagacgcgagaaagatcgatattgccgccggaaataatactgacggtttttctgttttgaatatattggtctaatttaccgcttaataatgcagcacatgccagagcgcctgcgccttcggtgacgactttattgcgctgaattaaggcaatcatactgtttctgatttcgtcttcgctgaccagcacgatgtcatcgactaattcacgaacgatttcgtaagttaaattacccgggcgggagacatcacaaccatccgccagggtgccggtagttcggtgcgtggttatttctccggagtggaaagaagccgccatgccgtgaacgttttcagactgtacgccaataacacgaatggtcgggttaatagatttaattgccaccgcaataccagcaattaaaccgccaccaccaattggcacaatcacgttatcgacatcatagagatcttccataatttccagaccaatcgttccctggccagcaatcactttcggatcatcgtaaggtgggataaaaatacggccttccatttcgacaatttcgctcactttagcgatagtgtcgttgaagttatcaccatgcagaacgacttctgcggagtagtcgcacgttgccgctactttggattttggcgcaccttttggcatcaccactttaccgtcgatacccagcatcgcgcaggagagggaaaccccttgcgcatggttgcccgcagaacaggccaccacgcctttgcgtttttccgcatcggtcagtgaacttaatttattaaatgcgccacgaattttaaatgaacccgtacgctgcatattttcaaacttcaggaatatttcacctttgcaacgttcactaaaatagttggagcgaggcatgcctgttttataaattcgcccagccagtcgttgtttcgcttcaataatgtcatcaatagcaaccggcagatcgtatgtaatatgcattataaaacctcttcgcctgaattaaatatgtaggtaaccgtaaccgacacctgcaagacagacaggtggattatttatgtttaaataaaaacaaataactaaccaacttctattaattgccttcgtctacacccattataagatgaatactctttggctaattccaccaaaaccgatgctgcttttttaatacgataatttttcgaccataccgcggcatattgtgccacaggtaatgtttcttcaaccggaatagtaataaattgattagaaccaaaaggtgacgtcatatcacaaggaattacagttaagaaatcagcattgagaacaagattataaattgtcacgactgagtcggttttaacgatgttttcaatactgatgccatttctttgtaacgtagtaagcagttcgctgtagtaccccatattagtttgtggcaacacccactgttcgttcttcaacgactccagcgtggtggtgccggtgcatgttcgggacttactggctaccagcacaaactcggactcgaacagcggctcaacatgtaaatcctgaagcttcatttctgcacttaacgtaccaatcgcaaaatccagtcgaccgtcgcggattgccggtaagaacgaagacagttgcgcttcatacatagaaacctgcgctttcgggaacacctctttgaacttgttgatcatccctgacataaaagtaaaaccaatcaatgaaggaaaaccaaatgagacttccaccaccgcctcagaagacataccgcttatctcattaaccatatttttcatttcacgggtaatggattcggaacgggagagtaacaattgaccggcaggtgttaatgttacaccggtatttttccgcaccactaattccacaccaaaataatcttcaatatcgttaatgattttactgacggccggttgagttaaccctaattcttttgcagccgagccgatagaaccacttctaatgacttcctgaaagactaccaggtgctgcgttttcggaagaagaatagtgctcataacgacctacgttaattacctcattgacggcatgaagtgtatcaaaatgaaatgaacaggatatgtgcgaccactcacaaattaactttcaatactttccagagtatcgttattacaattaaatacctttaaatatcaacaagttaaagtataaaaatcagcataaaccctgatttttgtcaaaaaaaatgacggggataaccatattttatggcgataacatcattcgttatgtggttaatacaaaaaaggggctgagaccatatttcaagcaattaccggataattaccaggcaaaatttgagttaaatttaatgagcaagttctcaaattttattataaataaaccattttcagtgataaataatgcggcatgtcacattttttcacgctatttgttggagaacaaacatttattttatcaatattttaaaatttcgaatacatgtattgatcatctcgaacaattgattaacgtcaactttttctcttctgacaggacgtcattttgtgaatgcaatcgttttccataaattcttctcccctcataggcgacgaatagcattttgtgttgaggatcacaaaacgaataattgctgatcgccgcgataaggtcagacaaagacaacaagggaaattttcacagagcttttgatcggcgtaggccacagaatgttgcttcgtttactgtaacgccgggtaaatgagcgttttttgatagtgcgaaagaaccctgcgaggaaaataagcatctattattgtttgtcatgatgacaaggcaggcatcaatgaaaggcttcccaattgcgcatatttttcacccttcaatcccgccaatgcacgcagtggttaacaatcacaatagaaatattgattattggacggtaaaaagaaagtttgcagaaattgtctccaccaatgacgttaataaaatttacagtataagtaatgaactgcggagagtattatctgcaataactgcattgaatttctatcatggcgatgttccttctgtcatgatccgaatccaaccggaaaatatgagtccattcattatagatatttctacaggagaacatgatgattatatcatacaaacattagatgtaggcacttttgcaccttttggtgaacaatgtacttgctcagccgtcaataaaaaagagctggaatgtattaaggagacgatttctaagtattgtgcaaaattcacccgaaaagaagccatcttaaccccccttgtgcactttaataaaaccagcattacttcagattgttggcaaattctctttttttcacccgatcattttaataatgatttttattgattatttataaaggataaaataatgttccctgtttcatcaattggtaatgatattagtagtgatttagtccgtcgaaaaatgaatgaccttcctgaaagcccaacaggaaataacctcgaagcactagcaccaggtatagaaaaactaaaacagacctctattgaaatggtcactttacttaacacgttacaacctggtggaaaatgcattatcactggtgattttcaaaaagaattagcgtacttacaaaatgtaattctttataatgtctcgtctcttcgtctggattttttaggttataacgcccaaattattcaacgatcggacaatacttgtgaacttaccattaatgaaccgttaaaaaaccaggaaatatccacaggtaatatcaatattaattgcccattaaaagatatttacaatgaaatcaggaggttaaacgtaatttttagttgtgggactggagatatcgttgatctatcctctctggacttacgtaatgtcgatttagattattatgatttcacagataaacatatggctaatactattttaaatccttttaaattgaattcaacaaattttactaatgccaacatgtttcaggttaattttgttagttcaacacaaaacgccacaatctcctgggattatttactaaaaataacgcctgttttaataagcattagcgatatgtattctgaagaaaaaatcaagtttgtcgaaagttgtttaaatgagcctggagacattaccgaagaacaattaaaaattatgagatttgcaattataaaatctataccaagggcaactcttacagataaattagaaaatgaattaacaaaagaaatatataaaagctcatcgaaaatcatcaattgcttgaacagaattaaattaacagagatgaaagaattctcatcagaaaaaatatatgattacatcgatataatcattgaagattatgaaaataccaaagaaaatgcttatctggtcgtcccccaaattaattatactatggatttaaacatagaagactctagctcagaagagttactttcagataataccctcgagaaagacgaaaattctccggacaatggctttgaggtcggggaatataacacatatgaagcatataactcagagaagcaatattttaccagagaggactatacgtatgattacgaccttttaaatgcaatatagacttaataacttcttacaaagtctattattaataccgtagatatttattcatcttaccctgtgcaccaaaagcaaaaactcactgacgcgggtttgaaactgatggcaaccgcaaaaatgcctgatgcgctacgcttatcaggcctacgccatctctgcaatatattgaatttgcgtgcttttgtaggcaggataaggcgttcacgccgcatccggcatgaataaagcgcactcaacaatctgaaacccgccggaacggtttattacgtacatcaggtaaaactgaccgataagccgctttcttttgggtatagtgtcgtggacagtcattcatctttctgcccctccaaaagtaaaaacccgccgaagcgggtttttacgtaaaacaggtgaaactgaccgataagccgctttcttttgggtatagtgtcgtggacagtcattcatctttctgcccctccaaaagcaaaaacccgccgaagcgggtttttacgtaaaccaggtgaaactgaccgataagccgctttcttttgggtatagcgtcgtggacagtcattcatctttctgcccctccaaaagcaaaaacccgccgaagcgggtttttacgtaaatcaggtgaaactgaccgataagccgggttctgtcgtggacagtcattcatctaggccagcaatcgctcactggctcaagcagcctacccgggttcagtacgggccgtaccttatgaacccctatttggccttgctccgggtggagtttaccgtgccacggactgttaccagccgcgcggtgcgctcttaccgcaccctttcacccttacctgatcccgcttgcgcgggccatcggcggtttgctctctgttgcactggtcgtgggtttcccccccaggcgttacctggcaccctgccctatggagcccggactttcctcccctccgcccgtctcccccgaagaggacgacgacgaagcggcgactgtctggtcagcttcggcgcgcagtatagagggtttgcgcgcccttgtcaccccgcgttgcgcattccaatcgccagtgtcgcggcgatattacgtgaagcacggcagatattgtcataagccccgcggaatgcttcgtccaacgtacctatgctggtcaatacgctgaagaccgcatcaatgccatgctgatgtacaacgccaacatcatcggtcaggctacccgcaatgccaatcaccggtttatggtacttcttcgccacgtttgcgacaccaatcggtaccttcccgtgaatactctggctgtcaatacgcccttcaccggtgatcaccagcgtacaatcgtgaatatgttcctccagattcagcgccgtagtgacgatttcaataccacttttcagttccgcaccaagaaacgccattagcgccgcgcccataccacccgcagctcctgcaccggggacatctttcacatcaacatgcagcgcttttttaatgacctcggcatagtgagagaggttattgtccagctcaacaatcatcgcttcactggctcccttttgtgggccaaagatgcgcgatgcgccgttatcgcccaccagcggattggtgacatcacaagcgacgcgaatgacgcaatcttttaagcgcggatcgaggccggaaatatcaatatcattcagagtattaagactaccgccgccaaaaccaatttcattgccgttggcgtcgcataatttcgcccccagcgcctgtaccatgcctgcgccgccatcatttgtagcgctgccgccaatgccgataataatgtttgtcgcaccgctctccagcgcctgcaggattaactcgcctgtgccgcgtgaagtggtcacgagtggatcgcgtttttccgcaggtaccagctccagcccactggccgccgccatttcaataaacgcggttttgccatcgccggagatcccccaactggcattcactttctcgcccagcggccctgtaacccaggcgtgacgttcagccccctgggtggctgcaatcatcgcttccaccgttccttcgccaccgtcggcaaccggaacagaaacgtactgtgcatcaggaaaaatttcccgaaatcctttttctatcgcctgcgcaacctcgctggcagataaactttctttataagagtctggggcgattacgattttcatacctatgcctgttaccacatgacgccggagggcgtttctcttattcggcctggattccaggcccggattgcaatacgccatccgggcacgacgtcattaacgagtaacttcgactttcgccagtttttcgtagtagcacgccagggcgctatgatccgccgttcctaaaccatctgctcgcagtgcctgcatcatctccataaccgcagctgtgagcggcagttgtgcgccgacgccgtgagaagtatccagcgcattcgccagatccttaatatgcagatcaatacggaagcccggcttgaagttgcggtccatcaccatcggcgctttggcatccagcacggtactgcccgccagtccaccgcgaattgcctgataaaccaggtccgggttaacgcccgctttagttgccagcgttaacgcttctgacatcgcggcaatattcagcgccacaatgacctgatttgccagtttggtgacgttacctgcaccgatttccccggtatgcaccacggaacccgccatcgctttcatcaaatcatagtatttgtcgaaaatagccttgtcgccgcccaccatcactgacagcgtaccgtcgatggctttcggttcaccgccgctcaccggagcatccagcatatcaatgcctttcgctttcagcgcttcgctgatttcacggcttgccagcggtgcgatagaactcatatcgatcaataccgtacctggcttcgcgccttcaataatgccattctcacccagcgccacctctttcacatgaggggagtttggcagcatggttatgatgacgtcgcactgttcagcgatcgctttagccgtagacgctgtttctgcacctgcagcaatcacgtcagcaatagcttctgggttacggtcagcaaccaccagcgagtaacctgctttcagaaggtttttactcattggtttacccataatccccaggccaataaaaccaactttcatagtcatatcaatcatctctcttgttgcggtggtggttattttttaaaggtatcagccagtttctgagtggcagagcggaagacgccgagatcgctgccgacagccacaaacgtcgcgccccattccagataacgacgcgcatcggcttcgaccggcgcgaggataccgctgggtttgccgtgcgcgctggcacggttaaaaatgtgctgaattgctttttgtacatccgggtgtgatgcattgccgagatggcctaatgccgcggccagatcgctggggccgacgaagatgccgtctacgccttcggtagcggcaatggcatcgacgttatctacgccctgctgactttctatctggaccagaatagtgatgttcttgttcgactgagcgaaataatccgccacggtgccaaacatattggcgcggtgagaaacggagacgccgcgaatgccttccggtgggtaacgggttgatgccaccgccagctctgcttcctcttttgtttctacaaaaggaatcaggaagttatagaaaccgatatccagaagacgcttaataattaccggctcgttggtcggcactcgcactactggcgcgctggcgctgcctttcaaggccattaactgcggaataaacgtggagatatcgtttggcgcatgttcgccatccagcaccagccagtcaaacccagccaaaccaagaacttcagtgctaatcgggttagagagtgctgaccagcaaccaatttgtacctgtttcgcagccagtgcggctttgaatttattcgggaaaacatcgttattcatcgcttatacctttgcttatttctgcaattccatacgtttaatgtcgccaactacgaagaggtagcagaccatcgccatcagcgctgaacatcccacgaaaaccagtgctgcattgaaggagtgcagttcacttaccaggtagccaatcaccagtggagtgacaatggaggcaacattgccaaagacgttaaagacgccgccgcagaggccaacaatctctttcggcgcggtgtcagaaatcaccggccagcccagcgcaccaaatcctttgccaaagaaagccagcgccatcagcatgaccaccagcgtggtgttgttggtgtagttacataagatgatggtggaagccagcaacattcccagcacaatcggtagcttacgtgccagggtcagggataaaccgcgtttgatcagataatccgagaagacacctcccagcacgccgcccgcaaaaccacacagtgctggaatcgaggcgaccagacccactttcagaatcgacatgcctttttcctgcaccagataaatcgggaaccaggtgaggaagaaccaggtgatggtgttgataaaatattgtccgaaaaatacgcccagcatcatgcggttagagagcaattgcttgatgtaatgcagtttgggtccgcttgctgccgcactgcccggctttttgtggtccatatcgaccaccgcgccattttcagagataaacttcagctcttccgcagacatacgtgggtgatctgtcgggttatgaatcaacttgatccacagcgccgtcagcacaaaaccaatcacccccataacggtaaagacgtgctcccagccccaggcgaaagtcagccagccaagcagcggcgaaaagagcgccagcgagaaatattgcgccgagttaaagatggcggaggcagtaccacgttctttcgtcgggaaccaggcggcgacaattcgggcgttcgccgggaatgatggcgcttccgagaagccgagcataaagcgcataaagaacatggagatccctgcccaggccagcgggaacatatcaacaaagccttgcaggaaggtgaatagcgaccagaaaaagaggctgtaggtgtaaacttttttcgagccaaacttatcaagcagccagccgccggggatttgcatcagcaagtaggcccagccaaaagcggagaagatgtaacccatcgaaaccgcacttaactgcaactcttttgccacttcggtaccagcaatagacagcgttgcacgatcggcgtagttaacggcggtaacaataaaaataatcagtaatattaaatagcgggtatgcacgcctttctttttttcgtcaacggtgtccagaatcattttatttacctcgggtacttatgctgatttttattattatggggaaggtgttatttatgagtttcatttatgccgtaacgacaatgaactcgggaattagtataagcagcgcgagaataataatcattgtgcaaatgctaatttaattaatactatttaaatattattttgagcatatgcacataaggttgcgcgctaaagcacagatttgcgctttaccttaccgggcggcactgcaatccctgaaatgattgacattgatcacatttctgcgtttaaactcctgacattcttatttcacccaatgaagtcatttatttttaaatgagaccaggtcctcattttaataacccctggctggagaatattgcacaatggccaacatcgaaatcagacaagaaacgccaactgcgttttatataaaagttcacgacacagataatgtggcaattattgttaatgataatggcctgaaagcaggaacgcgttttccggatgggctggaattaattgaacatattccccaggggcataaagtcgcattgctggacattccggctaatggtgaaattattcgttatggcgaagtgattggttacgccgtgcgtgcaatcccacgcggaagctggatcgacgaatcaatggttgtactaccggaagcgccgccgttacacacgctgccactggcaaccaaagtcccggaacccttaccgccgctggaaggatacacctttgagggctatcgcaatgccgatggcagcgtgggcaccaaaaacctgctcggtatcaccaccagcgtccactgtgtggcaggcgtggtggactatgtagtaaaaatcattgaacgcgatctgctaccgaaatacccgaacgtcgatggcgtggtggggctgaatcatttgtacggttgtggcgtggcgattaacgcaccggcggcagttgtacctatccgtaccattcacaatatttcgctgaatcctaactttggcggcgaagtaatggtgattggcctgggttgtgaaaagttgcagcctgagcgcctgctgactggaacggatgatgtgcaagctattccagtagaaagcgccagcattgtcagtttgcaggatgaaaagcatgtcggttttcagtccatggtcgaggatattttgcagatcgccgaacgccatctacaaaaactgaatcaacggcagcgagaaacctgcccggcttcagaactggtcgttggtatgcagtgcggtggcagcgatgcgttttctggtgtaacggcaaacccggcggttggctatgcgtctgatctactggtgcgctgcggcgcaacggtgatgttttcagaagtaacggaagtgcgtgacgcgatccatctgctgacaccacgcgcagtgaacgaagaggtcggcaaacggctgctggaggagatggagtggtacgataactatctcaatatgggaaaaaccgaccgcagcgccaacccttcgccgggcaacaagaaaggcggtctggcaaacgtggtagagaaggcactcggctccattgctaaatcgggtaaaagcgcaattgttgaagtgctgtcgcccggtcaacgcccgactaaacgcggattaatttacgccgcgacgccagccagcgattttgtctgtggcacgcaacaggtggcttcgggtatcacagtgcaagtgtttacgaccggtcgtggtacgccgtacggcctgatggcggtacccgtcattaaaatggcaacccgcaccgagctggcgaaccgctggtttgatttaatggatattaatgcgggcaccatcgctaccggcgaagaaactattgaagaggtgggctggaagttgttccactttattctcgacgtcgccagcgggaagaagaaaaccttctcggatcaatgggggctgcataaccagctggcggtgtttaacccggcaccggtgacctgatttcttttggaacgtccctcgcaaaacatggccttagtgccatgtttttattgtttaaagcccccacgtccattaataatgcatttgcattaccttagttcaagcttataatttgagcagaaaacaggctgtaaaaggacagtgaatcatgcccgctaatgctcgctctcacgctgtactgaccactgaatcaaaggtcacgatacgcggacaaacaactatccccgcgccagtgcgtgaggccttaaaactgaagccaggccaggacagcattcattacgaaattctgcctggtgggcaagtatttatgtgccgactgggagatgaacaggaggatcatactatgaatgcatttttgcgttttctggatgcagatatccagaacaacccgcaaaaaactcgtccattcaacattcaacaaggaaagaaacttgtcgctggcatggacgtcaacattgatgatgagattggcgacgacgaataatggattttccacaaagggttaatggttgggcgctatatgctcatccctgttttcaggaaacctacgacgctttagttgccgaagtcgagacattaaagggaaaagatcctgaaaattatcagagaaaagccgccacaaagttattggcggtagtccataaagtgattgaggagcatatcacggtcaatccatcatcaccggcattccgtcatggcaagtcgttaggctctgggaaaaataaagactggtcacgggtaaaatttggtgctggtcgttatcgtctcttctttcgttatagtgaaaaagagaaagtcatcattctgggatggatgaacgatgaaaacactctgcgcacctacggtaaaaaaacagatgcctataccgtattcagcaaaatgttaaaaagaggacatcctcctgccgactgggaaaccctcacccgagaaacagaagaaacccattgatggtgttcacaatgcccgccgaacgcattcgtgttgaccagcgggcatcctttctcactccccgaccagaatcacttcaaccccagcctttcgcagtccttccaggctatccgcaggaatgccttcatcaacaatgatcatgtcgatacgttgagtatcaatgatcttatgtaaactggaacgattgaacttactggaatcggtgaccacgatgatccgttccgcaacttcgcacatccgacggtttaaacgagcttcatcttcattatgtgtgctgacgccgcgctccagatcgatcgcatctacaccaagaaacagcatatcgaagtggtaattttgcagcgattgctcagcctgatcgccgtaaaaagattgcgactgacggcgcaaatgcccgccggtcatcagcagctcaacgccttccgcttccagcaacgcattagccacgttcataccgttggtcatcgcaattacgtcagtgtgcttgcgcatcagacgagcaatctcaaaagtggtggtcccggaatcgaggataacccgatgacctggctgaatcaactcaacggcagctttcgcaacgctgcgtttcatcgcggtgttcagtgcgcttttatcttccactgatggctcgactgacggcgtcgtgctatcgcagatcaacgcgccaccataggcacgcacagcgatcccctgcttttccagaaacgccagatcgttgcggatcgtcacagtagatacgccatacaatgccgacagatcgttaacctgcacactcccttgctgtcgcagacgctgaatgatctgttctcgtcgctcgctggtgccagtcactcgcttctcacctgaagcgtcggtattactcatagtaagtcctttcgtaaaactttcgtttcatttcgttttgcctattaacgcctttctattaagcaaatgcaagcccaccttgcccattgacgcaagctactctcgtttcagtgactttcattatgtttcttttgtgaatcagatcagaaaaccattatctttcgttttatttttatctcaccatgacgcagtatcaactgaaacaaaacgaaagattaatatcgcagtaatctgaactggagaggaaagtgaaacatctgacagaaatggtgagacagcacaaagcgggcaaaacaaatggaatttatgccgtttgttccgcacatccgctggtgctggaagctgcaatccgctacgccagtgcaaaccaaacgccgttactgattgaagcaacctccaatcaggtagaccagttcggcggttataccggaatgacgcccgccgattttcgcggctttgtttgtcagctcgccgactcgttgaatttcccgcaggatgcgttgattctgggtggtgaccatctggggccaaaccgctggcaaaacctgccggccgctcaggcaatggccaatgccgatgatttgattaaaagctacgttgcggcaggattcaaaaaaatccaccttgattgcagcatgtcctgtcaggacgatccgattcccttaactgatgacatcgtggctgaacgcgccgcccgtctggcgaaagtggcggaagaaacctgtcttgaacactttggcgaagccgatctggagtatgtcattggtaccgaagtgccggtacctggcggcgcgcatgaaaccttaagcgagctggcggtcaccacgccggatgccgcccgcgccacgctggaagcccatcgtcacgcctttgaaaagcaaggtttgaatgccatctggccacgcatcattgccctggtggttcaacccggcgtcgaattcgatcacaccaacgttattgattatcagcccgccaaagcgagcgccttaagccagatggtcgaaaactacgaaacgctgattttcgaagcgcactctaccgattatcaaacgccgcaatcgctgcgccagctggtgattgaccactttgccattctgaaagttggcccagcgctgaccttcgccctgcgtgaagctctgttctctctggcggcgattgaagaagaactggtgccagcgaaagcctgttctggtctgcgtcaggtgctggaagacgtgatgctcgaccgcccggaatactggcaaagccactaccacggtgacggcaacgcgcgtcgtctggcgcgtggttatagctactcggatcgcgtgcgctattactggccggacagccagattgatgacgctttcgctcatctggtacgtaatctggcggattcaccaattccgctgccgctgatcagccagtatctgccgctgcagtacgtgaaagttcgctccggcgagctgcagccaacgccacgggaactcattatcaaccatattcaggacatcctggcgcagtaccacacagcctgtgaaggccaataagcaaaacaaagaggaacacgctatgccaaatattgttttaagccggattgatgaacgcttgattcacggtcaggtcggcgttcaatgggtcggatttgcgggggcaaatctggtgctggtagccaacgatgaggttgccgaagatccggtacaacaaaacctgatggaaatggtactggcagaagggatcgccgtacgtttctggacgctgcaaaaagttatcgacaacattcatcgcgccgccgatcgacagaaaatcctgctggtttgtaaaacacccgccgatttcctgacgctggtgaaaggtggcgttccggtgaatcgcattaacgttggcaatatgcactacgccaatggcaaacaacaaatcgccaaaacggtttctgtggatgcgggcgatatcgcagcatttaacgacctgaaaaccgctggggtggaatgcttcgttcagggcgtcccgacagagcctgctgtggacctctttaaattactttgagggattcatcatggaaatcagcctgttgcaggcatttgcgttgggcattatcgcctttatcgctggcctggatatgtttaacggcctaacccatatgcaccgcccggtggtcctcggcccgttggtcgggctggtacttggcgatctgcataccggaattttaaccggcggtacgctggaactggtgtggatggggctggccccgctggcgggcgcacagccgcctaacgtgattatcggtactatcgtcggcacggcgtttgccattactactggcgtgaaacccgatgtcgcagtaggtgtcgccgtacctttcgctgtcgcagtacagatggggattaccttcctgttctcggtgatgtccggcgtgatgtctcgctgcgacctggcaacaaacccgcgccgcatttgatgctggtgccgacggcctggtgcattgctataacgggatgacaggtttacatcaccgcgaaccgggaatggttggcgcgggattaacggacaagcgcgcctggctggaactgatagccgatggtcatcatgtgcatccggcggcaatgtcgctgtgttgttgctgtgcgaaagagagaatcgtactgatcaccgacgcgatgcaggcagctgggatgccggatggtcgctatacgttatgtggtgaagaagtgcagatgcacggtggcgttgtccgtaccgcgtctggtgggctggcgggcagtacgctgtctgttgatgcggcagtgcgcaatatggtcgagttgacgggcgtaacgcctgcggaagccatccatatggcgtcgctgcatccggcgcgaatgctgggtgttgatggtgttctgggatcgcttaaaccgggcaaacgcgccagcgtcgttgcgctggatagcgggctacatgtgcaacaaatctggattcagggtcaattagcttcgttttgatagtttgctcctttattgggccttcacttcccccgtaaggcctttctttttctttcgttttgatctgtgcagcggtgtcggatgcgacgctaacgcgtcttatccgacctacagttggtgaccgcaaggccggataaagcgtttgcgccgcatccagcaatcccttttgcttcctttatcttttctttcaacgatcacaaatttcgttttatttcttttttctccattgaactttcagtttcttttctatagattttaatcaacgaaagacatcaccaagtgaaatgaaacgaaaggcaagtgaaagcgacaacgcccgacgtcaagttcatcagactaaggattgagttatgccagaaaattacacccctgctgccgccgcaaccggtacatggactgaagaagagatccgccatcagcctcgcgcatggatccgttcactcaccaacatcgacgcgctacgttccgcgctcaataacttccttgaaccgttactgcgcaaagagaatctgcggatcatcctgaccggagccggaacgtcggcatttatcggtgacatcatcgcgccgtggctcgccagccataccggtaaaaacttcagcgccgtaccgaccaccgatctggtcaccaatccgatggactacctgaacccagctcatccgctgctgttgatctccttcggtcgatccggcaacagcccggaaagcgtcgcagccgtggaactggcaaatcaatttgtaccggaatgctatcacctgccgatcacctgcaacgaagcgggcgctctttaccaaaacgcgatcaacagcgataacgcgtttgccctgctgatgcccgcagaaacgcacgatcgcggctttgcgatgaccagcagcattaccaccatgatggccagctgcctcgcggttttcgcacctgagacgatcaacagccaaaccttccgcgacgtggcggatcgttgccaggcgatcctgacctcactgggcgatttcagcgaaggtgtgtttggttacgcaccgtggaaacggatcgtttatctcggtagcggtggcttacagggcgcagcacgcgagtcggcgctgaaagtgctggaactgacggcgggtaaactggcggccttttatgattctccaaccggattccgtcatggaccaaaatcgctggtcgatgacgaaacgctggtggtggtatttgtctccagccacccttacacccgtcagtatgatcttgatctgctggctgaacttcgccgtgacaaccaggcaatgcgtgtaatcgccatcgccgcggaaagcagcgacatcgtcgctgccggtccacatatcatcctgccaccgtcacgtcactttatcgacgttgagcaggcattttgcttcctgatgtacgcccagacgtttgcactgatgcagtcgctgcacatgggcaatacgccggataccccatcagccagtggcaccgttaaccgcgtggtgcaaggcgtaatcattcatccgtggcaggcataagaggatcgcattatgagcattatctccactaaatatctgttacaggacgcccaggccaatggctacgcggtgcctgcttttaacattcataacgccgagacgatccaagcgatcctcgaagtgtgcagtgaaatgcgatcgccggtgatcctcgccggaacgccggggacctttaaacacatcgcgctggaagagatctacgccctgtgtagcgcctattccacaacctacaacatgccactggcgctgcatctcgaccaccacgaatcgctggatgatattcgccgtaaagtccacgcaggtgtgcgcagtgcgatgatcgacggcagccacttcccgtttgccgagaacgtgaagctggtgaaatcggttgttgacttctgccactcacaagattgcagcgtggaagcagaactgggccgcctgggcggtgttgaagatgacatgagcgttgacgccgaaagtgcattcctgaccgatccacaagaagctaaacgctttgtcgaactgactggcgtcgacagcctggcggtagcgattggtacggcgcacggcttatacagcaaaacgccgaagattgatttccagcggctggcggaaattcgtgaagtggtggatgttcctctggtgctgcatggtgccagcgatgttccggatgaatttgtccgtcgcactattgaacttggcgtcacaaaagtgaacgttgccacagaattaaaaatagccttcgctggcgcggttaaagcctggtttgcggaaaatccgcagggtaatgatcctcgttattatatgcgcgtcggaatggatgcgatgaaagaagttgtcagaaataaaattaatgtctgtggttcagcgaatcgaatttcagcataatcattagttttttatgatttatcccaatgtacttcccgattaatatcggggagtgccttaatggaaaaggagataactaaaccttaataaatacatcactacaatatcgcaacaataatatatttaaaaaaattatattattcaactttatggtgaggattacacaatgaccagtccaaatattctcttaacccgtattgataaccgtctggttcacggtcaggttggcgtgacctggacatccaccatcggtgcaaatctgctggtagtcgtggatgatgttgtcgctaacgatgatattcaacagaaattaatgggtattaccgcggaaacctacggctttggcattcgtttctttactatcgaaaaaaccattaacgtcatcggcaaagctgcaccacatcagaagatcttcctgatttgccgtacgccacaaacggtacgtaaattggtagaaggtggtattgacctgaaagatgtcaacgtcggcaatatgcatttctcggaagggaaaaagcaaatcagcagtaaagtttatgtcgatgaccaggatctcacggacttacgttttattaaacaacgtggcgtgaatgttttcattcaggacgtccctggcgatcaaaaagaacaaatccctgactaaatctaaaatcgccttaatattggtttgaggtaataaaaatgcatgaaataaccctacttcagggattatccctggcggcgttagtttttgttctggggattgatttttggctggaagccttatttttattccgcccgataatcgtttgtaccctaactggcgctattctcggtgatattcagactggcttaattaccggtggtctgacagagttggctttcgccggattaacccctgcaggtggtgttcagccgcccaacccgattatggcgggtctgatgaccaccgtcattgcatggtctacgggcgttgatgccaaaacagcaattggtcttggcctgccgtttagtttgttaatgcagtacgtcattctgttcttctattccgctttctcattatttatgaccaaagccgataaatgcgcgaaagaggcggatacggcagcgttttcccggcttaactggacaacgatgctcatcgtcgcttcagcgtatgcggtgattgctttcctctgtacttacctggcacagggggcgatgcaggcgctggtgaaagcgatgcccgcctggctgacccacggctttgaagtggctggcggtattctgcctgccgttggttttggcttgctgctgcgcgtaatgttcaaagcgcaatatatcccttacctgatcgccggtttcctgtttgtttgctacatccaggtcagcaacctgttgccggttgccgtactgggcgcaggctttgcggtgtatgagtttttcaatgcgaaatcccggcagcaagcgcaaccgcagcccgttgccagtaaaaatgaagaagaggactacagcaatgggatctgaaatcagtaaaaaagatatcacccgtctgggctttcgttcgtcgctgctgcaagcgagctttaactacgaaaggatgcaggcgggcggttttacctgggcgatgttgccgatcctgaaaaagatttataaggacgacaaaccgggcttaagcgcggcgatgaaagataacctcgaatttattaatacccacccgaatctggtcggattcctgatggggttattaatttcgatggaagaaaaaggagaaaaccgcgacaccattaaaggcctcaaagtggcactgtttggcccaatcgccgggattggcgatgcgattttctggtttactttgttgccgattatggcgggaatttgctcatcatttgccagccagggaaacctgctggggccgattctatttttcgccgtttacctgcttatctttttcctgcgcgtcggctggacccacgtcggttattcagtcggcgtgaaggcgatcgataaagtgcgagagaactcgcagatgattgcccgttcggcaaccatcctcgggatcacggtaatcggcgggctgatcgcttcgtatgtgcatattaacgtggtgacatcgtttgccatcgacaatacccacagcgttgcgctgcagcaggatttcttcgataaagtcttcccgaacattttaccgatggcctacaccctgctgatgtattacttcctgcgggtgaaaaaagcgcatccggtgctgttaatcggcgtgacttttgtgctctctattgtttgttccgcattcggcattttgtaaatggaacgaggcactgcgtctggtggtgcctctttacttaaggaatttcatcctgtgcaaacccttcagcaagttgaaaactatacggcgttaagtgaacgtgccagcgaatatttattggccgtgatccgtagcaaaccgaatgccgtgatttgcctggcgaccggagccacgccattactgacgtatcattatctggtagaaaaaatccaccagcagcaggttgatgtcagccagctcaccttcgtgaagctcgacgaatgggtggatctgccattaacgatgccaggcacctgcgaaactttcctgcaacagcatatcgtgcagccgctggggctacgtgaagaccagctcatcagctttcgctccgaagagataaatgagacagagtgcgaacgggtaacgaacctgattgcgcgcaaaggcggtctggatttatgcgttctcggattggggaaaaacggtcatcttgggctgaacgaaccgggagaaagcctgcaaccggcctgccatatcagtcaacttgatgccagaacacagcaacatgagatgttaaaaaccgcgggtcgccccgtgactcgtgggatcaccttaggcctgaaggatattctcaatgcccgcgaagttttgttactggtgactggcgaaggaaagcaggatgcgacagatcgttttctcacggctaaagtctctaccgctatcccggcttcatttttatggctgcacagtaactttatttgtttaattaacacctaaccagatgaaaaatttgctcaaaatgtttaaattaacttatgtaacagtcacgcattatattaaataacatttgactgggttgaacataacgccgatagcaaaaggagttatgttcaacaatttaattttagatatacatataacttgttctattaataaatcacctcgtattctgactcgccccctggcgcagcaaagtcaggcatttatactcttttgaatacatagaaaattgatatcaatataatgaaaatatcaaatatttgcatataaatataatcttaaagttcagtctatttaatgttcaatgaaatatttctgcctgtataatctttaaagatgttgaacatatattcacattaaatatgattatgtacttgttacaaggataaggttatatatgaataaagttacaaaaacagctattgcgggcttacttgcgcttttcgcaggtaatgccgctgcaaccgatggtgaaatagtttttgatggcgagattttaaaatccgcttgtgaaatcaatgactctgataagaaaattgaagttgctcttggtcactataatgccgaacagtttcgtaatattggcgagcgtagcccaaaaattccattcactattcctttagttaactgcccaatgactgggtgggagcacgataacggcaacgttgaagcgtctttccgtctatggctggaaacgcgagataatggcaccgtccctaacttccctaatctggcaaaagtaggctcttttgctggcatagcggcaacaggtgtgggtatccgtattgacgatgcggaaagcggaaacattatgccactgaatgctatgggcaatgataacacggtttatcagatcccggcggaatccaatggtattgtcaatgttgacctcatcgcttactacgtatcaaccgtagttccatcagaaatcaccccaggggaagcagacgctatcgttaacgtaacgctggattaccgttaatacgttagggcgttatctgacctgtcagataacgcccttttccttcctctttctcgttgtatcaggttgaaaaataactatgtcaaaacgaacattcgcggtgatattaaccttgttgtgtagcttctgtattggccaggcgcttgcaggaggaatcgttttacagcgaacgcgagtgatctatgatgccagccgcaaagaggctgcgttacctgtcgcaaacaaaggcgcagaaacgccttatttactgcaatcatgggtagataatatagatggtaaaagccgtgccccatttattataaccccaccgctatttcgtcttgaggctggcgatgactcatcactgcgaattattaaaacagctgataacctgcctgaaaataaagagtcgctgttctacattaatgttcgtgccattccagcaaagaaaaaatcagatgatgttaatgctaacgagttgacgctggtatttaaaacacggatcaaaatgttttatcgccccgcacacctgaagggacgggtaaacgatgcgtggaaatcactggaatttaaacgtagtgaccattcactcaatatatataacccaactgaatattacgtcgtatttgccggactggcagtcgataaaaccgatctcacaagcaaaattgaatatatcgcgcccggagaacataaacagttaccacttcctgcatctggcggaaagaacgtgaaatgggctgcgatcaatgattatggcggcagttccgggacagaaactcgtccactgcaataaaaaatataaaaacacaggtcatcagggaatgccacaacgacaccaccagggacataaacgcacaccgaaacagttggcgctcatcatcaaacgttgtttgccgatggtgctcactggcagcggcatgctttgcactaccgctaacgccgaagagtattatttcgaccccattatgctggaaaccacaaaaagtggtatgcaaacaaccgatctgtcgcgtttttcaaaaaaatatgcacaactaccaggaacttatcaggttgatatctggctgaataaaaagaaggtttcacagaaaaaaattacatttaccgccaatgcagagcaacttctgcagccacagtttacggtagaacaactacgtgagctgggtattaaggtggatgaaatcccggcgctggctgaaaaagatgacgatagcgtgatcaactcgcttgaacaaatcattcccggtacagctgctgaatttgatttcaatcatcagcaacttaatttgagcattccccaaattgcactgtaccgtgatgcaagaggttacgtctccccttctcgttgggacgatggtataccaacgctgtttaccaactactcgtttacaggttctgataaccgttaccgccagggcaatcgtagccaacgacagtacctgaatatgcaaaatggtgctaattttggcccctggcgattacgcaactattccacatggacacgcaacgatcagacatcaagctggaataccatcagtagttatttacaacgtgatatcaaggcgttgaagtctcagttgcttctgggagaaagcgccaccagcggcagtattttttccagctacacctttactggcgtgcaactcgcttccgacgataatatgttgccaaacagccagcgcggatttgccccaacggtacgcggtatcgcaaacagtagtgcaatcgtgactatcaggcaaaatggttatgtgatctatcaaagcaacgtgtcagcgggtgcctttgaaattaacgatctctacccctcttccaacagcggcgatttagaagtcacgattgaagaaagtgacggtacacaacgtcgctttatccagccttattcttcattacccatgatgcagcgacctgggcatctaaagtatagcgcgaccgctggacgctatcgcgctgatgcaaacagtgatagcaaggaacccgaatttgctgaagccacggcaatatatggtttgaataatacttttacgctgtatggcggcctgctcggttctgaagattattatgcgctggggatcggtatcggcggcacacttggcgcactgggcgcgttgtcgatggatatcaacagagctgacacccaattcgataaccagcactcttttcatggctatcaatggcgtacgcagtacatcaaagatatcccggaaaccaacaccaatatcgctgtcagctactatcgctataccaacgatggctattttagttttaatgaagccaatacccgcaattgggactataacagtcgccaaaaaagtgaaattcaattcaacatcagccagacaatatttgatggggtaagtctgtatgcctccggttcgcagcaagactattggggcaataacgataaaaacaggaatatctctgttggggtttccggccagcaatggggagttggttacagcctgaattatcaatacagccgctacactgatcaaaataatgaccgcgcactctctttgaatctcagtattccgttagaacgctggttaccgcgtagccgggtttcctatcagatgaccagccagaaagatcgcccaacccaacatgaaatgcgtcttgatggctcactgctggatgatggtcgcctgagctatagcctggaacaaagtctggatgacgataacaaccataacagtagcctgaacgccagttaccgttcaccttatggcaccttcagtgccggatacagctacggtaatgacagcagccaatacaattacggcgttaccggcggcgtggttatccatcctcatggcgtgacgctctcgcaatatctgggcaacgcttttgcgcttatcgatgctaacggagcatctggcgtgaggatacaaaactatccggggattgctaccgatccttttggctatgcagtggttccttatctcacaacttatcaggaaaaccgtctctcggtagatactacgcagctgcccgataacgtcgatcttgaacaaacaacacagtttgtggtgcccaacagaggtgcaatggtagcggcgcgtttcaacgccaatatcggttatcgcgtacttgttacagtcagcgatcgcaacggtaaaccgttgccctttggcgctcttgccagcaacgatgatacggggcaacaaagtatcgtcgatgagggcggcatactatatctctctgggatatcgagtaaatcacaaagctggactgtacgctggggaaatcaggcagatcaacaatgtcagtttgctttcagtacaccggattcagaacctacaacctctgtattacaaggcacagcgcagtgccattaaggataaaaaaatgaaaagagcgcctcttataacaggtcttttgttgatatccacatcctgcgcttatgcctcctcaggagggtgtggagccgacagcactagcggtgcgacaaattacagcagtgtggttgatgatgttacggtgaaccagacagataacgtgacaggacgggagtttacctctgcaacgctaagtagcactaactggcaatacgcctgttcctgctctgcgggtaaggcagttaaacttgtctatatggtcagccccgtacttaccaccactggacatcagacaggatattacaaactcaatgacagcctggatattaaaaccacattacaggcaaacgacattccaggactcacaaccgaccaggttgtctctgttaacacccgattcacacagataaaaaacaacacggtatattctgctgcaacccaaacgggtgtttgccagggtgatacgtctcgttatggacccgttaatattggtgcgaacaccacctttaccctgtatgtcaccaagccatttctcggctcgatgaccattccgaaaacggatattgccgtcattaaaggcgcgtgggtcgatggaatgggaagcccgtctacaggtgacttccatgatttagtcaagttatcgattcagggaaatctcaccgccccacagtcgtgcaaaattaatcagggcgatgttattaaggttaattttggattcatcaatggtcagaagtttaccacccgcaatgccatgccagacggttttactccagtagactttgatatcacttatgactgtggtgatacttcaaagattaaaaactcgttgcaaatgcgcatcgacggtacaactggggtagtagaccagtacaacctggtcgccaggcgaagaagttcagacaatgtgcccgatgtcggtattcgtattgaaaatctcggcggcggagttgcaaatattccttttcagaacggtatccttcccgttgatccttccgggcatggcaccgtcaatatgcgcgcctggccagttaatctggtcggtggtgagctggaaacaggaaaatttcagggcacagccaccattaccgtcatcgtgcggtaaaagaagacgttgcgttttgattaacgcaacgcttcggcactgttacccctgctgctccagcgcatacttatacagcgcatttttcttcacgccgtgaatttctgcggccagcgccgccgcttttttcagcggcagttctgcctgtagcagcgccagcgtgcgcagggcatcggcgggtaagtcttcttcctgtgctttatgaccttcgacaatcagcaccatttcgcctttgcgacggttttcatcttcctttacccacgccagcagctcgccaacgggcgcgccgtgaatggtttcccaggttttggtcagctcacgcgccagaaccacgtagcgggattcgcctaataccgcaacgatatcttccaggctatctaacagacggtgggtagattcataaaaaatcagcgtgcgcggctccgcttcaatggcttttagcgcatcacggcggccttttgatttggcaggtaaaaagccttcgtaacagaaacggtcagagggtaaacccgctgcgcttaacgcagtgatagcagcacacggcccgggtagcggcaccacgcggatccccgcttcacggcaggtacgcaccagatggtagccaggatcgttaattagcggcgttccggcatcggaaaccagcgcaatgttttgcccctcttgcagcttcgccagcagcgtttcagctttttgttgttcgttatggtcgtgcagcgcaaacaaccgggcattaatcccaaaatgttgcagcaataaaccggtgtgacgagtatcctcggcggcaatcagatcaacggcctgtaatacctctaacgcacgctgggtgatatccgccagattgccgattggcgtcggtacaatgtaaagctggccctgagaattatccgccgattggtgttgtttcattgtgtcgtccgtattgccgatttaatattgagcattgcgtaaaaaaaatatcactggatacattatggtaccctcaacattttctcgtttgaaagccgcgcgttgtctgcctgttgttctggcagccctgattttcgccggttgtggcacccatactcccgatcagtccactgcttatatgcagggcacggcgcaggctgattctgccttttatcttcagcagatgcagcaaagctctgatgataccaggatcaactggcaattactcgccattcgtgcactggtgaaagaaggtaaaaccgggcaggcggttgagttgtttaaccaactaccgcaagaactgaacgatgctcagcgtcgcgagaaaacactgctggcggtagagattaaactggcgcagaaagattttgctggcgcgcaaaacttgctggcgaaaatcacacctgccgatttagaacaaaaccagcaagcgcgttactggcaggcaaaaatcgatgccagccaggggcgtccttccattgatttactgcgcgcgttaattgctcaggaaccgctgcttggcgcgaaagaaaaacagcagaatattgatgccacctggcaggcgctctcctccatgactcaggaacaggcgaatacgctggtgatcaacgccgacgaaaatattctgcaaggctggctggatctgcagcgcgtctggtttgataaccgtaacgatcccgacatgatgaaagccgggatcgccgactggcagaaacgttatccgaacaatccgggcgcgaaaatgctgccaacgcagttggttaacgtaaaagcgtttaaaccagcctcgaccaacaaaatcgccctgctgttgccactgaatggccaggcagcggtatttggtcgcactattcagcaaggctttgaagcggcgaaaaatatcggcactcagccagtggcagctcaggtagctgccgcacctgccgcagacgtagctgaacaacctcagccgcaaaccgtggatggcgttgccagcccggcacaagcctcggttagcgatctgaccggtgaacagcctgcagcccagccggtgcctgtaagcgccccggcgacaagcaccgcagcggtaagcgcacccgcaaatccatccgcagagctgaaaatctacgatacctcatcacaaccacttagccagatcttaagccaggttcagcaggatggcgcgagtattgtggtcggtccgttgctgaaaaataacgttgaagagttgctgaagagcaacactccgctgaacgtactggcactgaaccagccggagaatatcgaaaatcgcgtcaatatttgttacttcgcgctttcaccggaagacgaagcgcgcgatgcagcgcgtcatattcgtgaccagggtaaacaagcgccgctggtgctgatcccacgcagttcattgggcgatcgcgtagccaatgcgtttgcgcaagagtggcagaaactgggcggcggcaccgttctgcaacaaaaatttggttccaccagcgaattacgcgcgggtgttaacggcggttctggtattgctttaacgggtagcccgattactctcagagcgacaaccgactccggcatgacgaccaacaatccaacgctgcaaaccacgccaaccgatgaccagttcaccaataatggcggtcgtgtcgatgcggtgtacattgtggcaacgccgggtgaaatcgcttttatcaaaccgatgatcgccatgcgtaacggtagccagagcggtgcaacgctgtacgccagctcccgcagtgcgcaagggaccgctggcccggatttccgactggagatggaaggcttgcagtacagcgaaatcccgatgctggcaggcggtaatctaccgttaatgcagcaggcactcagcgcggtgaataacgattattcactggctcgcatgtatgcgatgggcgtcgatgcctggtcgctggcaaatcatttctcacaaatgcgccaggttcagggttttgaaatcaacggtaataccggaagcctgacggctaacccggattgcgtgattaacaggaacttatcatggctacagtaccaacaaggtcaggtagtccccgtcagttaaccaccaaacagaccggcgatgcgtgggaagcacaagcgcgtcgctggctggaaggcaaaggactgcggtttatcgccgctaacgtgaacgagcgtggcggcgagatcgatctgataatgcgtgaaggccggaccaccatttttgtcgaggtacgctatcgccgctctgcgctttatggcggcgcggcagccagtgtgacccgcagcaaacaacacaaattattacagactgcccgcttgtggctcgcgcgtcataatgggagttttgatactgtggattgccggttcgatgtggtagccttcaccgggaatgaggttgagtggattaaggatgcctttaatgaccactcataattaaggtttaaggattagcgtgcaagaaagaattaaagcttgcttcactgaaagcattcaaactcaaattgcggcggcagaggcgcttccggatgccatctcccgtgcagccatgacgctggttcagtctctgctcaatggcaacaaaatcctctgttgtggtaatggaacttccgctgccaatgcacagcattttgctgccagcatgatcaaccgtttcgaaacggagcggcccagcttacctgccattgcactaaatactgataatgttgtcttaacggcgattgccaacgatcgcttacatgatgaagtgtatgcaaaacaggtgcgggcgctgggtcatgcgggagatgtattgttagccatttccacccgtggcaacagccgcgatattgttaaagcagttgaagccgccgttacgcgtgatatgaccattgtggcattgaccggctatgacggcggcgaacttgcaggtttgttagggccacaggatgtggagatccgcattccttcgcatcgtagtgctcgcattcaggaaatgcatatgctgacggtaaattgcctgtgcgatctgatcgataacacgcttttccctcaccaggatgattaaggagaatacatgaaggcattatcgccaatcgcagtccttatttccgcgctgctgttgcaaggttgtgttgccgctgccgtagtgggtaccgctgctgtgggtaccaaagccgcaactgacccacgcagtgtcggcacccaggtggacgatggtaccctggaagtgcgcgtgaacagcgcattgtcgaaagacgaacagattaagaaagaagcgcgcattaatgtaacggcctatcagggcaaagtgctgctggttgggcagtcaccaaatgctgaactttcggctcgcgccaaacagattgctatgggcgtagacggtgccaacgaagtgtataacgagattcgtcagggccagccgattggtctgggcgaagcatctaacgatacgtggatcaccaccaaagtgcgttcgcagctcttaaccagcgacctggtgaaatcgtccaacgtgaaagtgaccaccgaaaacggtgaagtgttcctgatggggctggtgactgaacgtgaagcgaaagcggcggcagatattgccagccgggtgagcggcgtgaagcgggtaactacggcgtttacgtttattaaatagcagccccttgtaatgcctgatgcgacgcttgccgcgtcttatcaggcctacaacgatacaaaccgtaggtcagataaggcgtttacgccgcatccgacatgttttccctcaaatcagaacaacagcgccagcccgccgacaatcacaccagacactgccaccatcgcccctgtcagccataaggctttcgccgggaacgctttgcgcagcataatcagtgacggcaaactcactgccgggagcgtcatcaacaatgccagcgccggagcggttcccatacctgccagcatcatcgtttgtacaatcggaatttctgctgccgtgggaatgacaaacaagcatcctgctaccgccatcgccaccacccacatcaggctgttatcgacagcaccatcggcatgggggaataaccagacgcgagcggcacccaacaccagtactgcaaggatgtaaaccgggatcgtactccagaaaagcgtccatagcgccctgccccagcggctaaaaaacccgccctgtgcttccggtatgtcaatttcgaccggtgcctgcgtttgcggtgtttcacgcacccatttttgcaccagcgtcgcaatcagcaacaccatcaccagcccggccaccagacgaatcgccgcaaaaccccagccgaggacaaagcccataaacaccagcgtcgccgggtttaacaccggattgcccatccagaatgccagcgcaccgcccatcgacacctgttggcgacgcattcccgccgcgaccggagccgcacagcaggtacacatcatgcccggcaacgaaaacagcgttcccagcagcgtgccgcgaaagcgcgattgcccaagcgtacgcaacaaccagtcacgcgggatcagcacctgaatcaacgaaccgaggatcacccccagcaccgccgctttccataccgcgaggaaatagatcatcgcgtaatccaacgccgcctgccatgggttagcatccgcctgcgcaaggatagatttaccgatactgtgggtttcggcagcagtaaacgctttgccgtagtaaggttcccatttcacataccagagaccggcaatgacaacgagaaagaaaagcgcgggtttccaccactgaatgggcgttgccgcctgagatgaagactgaccagtcatagcattccccaggaataagttatgataattgagcgcgtgaatattacgctcactatcaattcttgggaataattattcagctcttttgcgtaattctgaagagcttaaaatcgtcacgccttcatgctcaggccgcatcgactctgccagcatgacccgcgccacgtctctcgcatcaatggatttccagttacctggtaacaaacggaacagcggcgcaaaaagcgtttcgttcatccgctgtttgctacgatcgcccagtaacatcgacgggcgagcaatggtcaatttcggccagttctgggcgattaatgcttcttccatctcccctttgacgcggttatagaaaaacggcgagtgggcattggcacccatcgcactgactaccaacatatgctgcgcgcccagtcgccgcccggttaatgcggtatccactaccagcgtgtaatcggcatgaataaacgcctctttgctccccgcttctcgccgcgtggtgccgagacaacaaaacacaatgtcgatgggatcggtgacctgcgccaacgcgtcactcagttgcggatcatggggattaaacaccccgggcatatcgcccaacggacgtcgcgtcggcgcagcaatggcgttaactttcggttcgttaatcaacatccgcagcaggtgaccgcccaccagccccgttgcgcctgtaatcagtacctgactcatcttcgctcctttacagaattgtctgccttgcgctccacggctcatgcaccaggcttaatagaccatgaggtaattatccccgattgtgggaaattcgcctcatccaatgcaacaacgcggaggaagcatgagtaagaaaattgccgttttaatcactgatgaatttgaggattcagaatttacttcacccgcagacgagttccgtaaagccggacacgaagtgattaccattgaaaaacaagcgggtaaaacggtgaaaggcaaaaaaggagaagccagcgtgaccatcgataaatccatcgatgaagtgacgcctgcggagtttgatgccctgctgctaccgggcggccattcaccggattatctgcgtggggacaaccgttttgtcacctttacccgtgattttgtgaatagtggcaaaccggtgtttgccatctgtcacggcccgcagttgctgatcagcgccgatgtgattcgggggcgcaaactgaccgcagttaaaccgatcattattgatgttaaaaatgcgggcgcggaattttacgatcaggaagtcgtggttgataaagatcagctggttaccagccggacaccggacgatctgccagcgtttaaccgcgaggcgttacgcctgctcggtgcctgagtcgcgtagccaaatcatttttttaccaaagcccagcgtgttgtcggtgaatttgatttcatcgagccggatttcccacaccggggccgacagcattctggcaaccggaaagcgacgattgtacgccttgcgcgcgaggtcgctttcctcaccttccagcctgcggatctcacctttaaactgcacaccgcgaattaacgctaccgttttcggctgaccgtttaccgttccggcaaccgcagcctgcggcccactcatctgcgcgtggcgcgttttttcttccgtcaaaatgtagaaggcgactttctgcgcatcaaaaagataaaaggcattagcgcaccagagttccccttcctgctgcacacaccaagtgacaacatgttgttttgccagccaacggctgatggcgatgagtgtttccattgctgttctcttttatactgtgggcctgaccttaacatgcgacgcagacgatgacaccctggtttctttacttgatccgtaccgccgacaataagctttataccgggatcaccacggatgtcgaacgccgctatcagcagcaccaaagcggcaaaggggcgaaagcactgcgcgggaaaggagaactaacgctggtgttttccgcgccagtgggcgatcgttcgctggcgttacgggcggaatatcgcgttaagcaactgaccaaacggcaaaaagagcgtctggtagcggaaggcgcagggtttgcagagctgttaagcagtctgcaaaccccggagattaaaagcgattgaaatgctcgtgatactcaaccaggccggtaacgccattcagcgcgtcatccgctaaacgatgtacctggaaggcgctttcagtgcccggccagcggcaacgcagatcgtgatgcgccgccagttcaaagccgaaacgactgtacagcgccggatcgcccagcgtcaccactgcggcatagccgaactcattaagcgaatcgagtccttcatagaccagttggcgtgccagcccctgtccacggtatttttcatcaaccgccaacggtgccatgccgacccattgcaggtcttcgccctgcacatcaaccggactaaatgccacatagccaatgacctgaccttcgtcatctgtcgccaccagccccagcgtcagaaagccatcttcacgcagatcgtgaaccagcttcgcttccgcatcactttcgaatgagcgacgcagcagggcatcaatacccggcgcatcaatgggaatttctactcgaattagcatggttcacctaccgatgtctgtttggtttcaggcgcggttttcattcccgcctcaacaaaatccgccagttgcagcagcatcatgcgtaaggctttcggcatttgctccagttcaatggcgtccatcaggtttttcacatacagccccagctccgtatcgccttcaatcaccagccgacgctggaagaagagcgtatccggatcttgtttacgcgccgcaatcatcagcagatcgctggcgtcggcactaaaactcacatcagcttgcgcgttctggctaacgaccagtttgccattcaccaccgaggtaaaccattgcaggtcaatatcacgcacatgaatacttaaccagcggccttcaagaaactccagctcgccatcatccagcgcctggcggaattgccagcttaagacctgctcaagaacctggcgttttagcgcaaatggcgtcagttttaccggtacactcaacagagatggccccaaatgcacaatacgggaacgcagtttatccaacacgagttttactccctgtttcaacaatcatcctattttgccatatcagaaaaataacatagcggtataaatcaacaattccatatgaaattgctgctaccaccaatacaactttaactgccttaaatcaaaaattgtcgcagcaaggttaactaaaatcccagttcgttaacatttttgcgttttgatagcgcaaccttcaggaaaaattatggagctgctctgccctgccggaaatctcccggcgcttaaggcggccatcgaaaacggcgcagatgctgtttatatcgggctaaaagatgataccaatgcccgtcacttcgccggccttaactttaccgagaaaaaattgcaggaagcggtgagttttgtccatcaacatcgccgcaaacttcacatcgcgattaacacttttgcgcatccggacggttacgcccgttggcagcgcgccgtggatatggcggcgcagctgggtgccgacgcgctgatcctcgccgacctcgccatgctggagtacgccgccgagcgttatccgcatattgagcgccacgtatcggtgcaggcttcggcgaccaatgaagaggcgattaacttttatcatcgccattttgacgttgctcgcgtggtgctgccgcgcgtgttgtcgattcatcaggtgaaacaactggcacgggtcacacctgtaccactggaagtctttgctttcggcagcctgtgcattatgtcggaaggtcgttgctatctgtcgtcgtatctgacgggtgagtcgcccaacaccataggcgcgtgttctccggcccgtttcgtgcgctggcaacaaacgccgcaggggctggaatcccgcctgaacgaagtgctgatcgaccgttatcaggacggcgaaaacgcaggttatccgacgctatgtaaagggcgttatctggtggacggcgagcgctatcacgcgctggaagaaccaaccagtctcaataccctggaactgctgccggagttaatggcggcgaatattgcttcggtgaaaattgaaggccgccagcgtagcccggcgtatgtcagccaggtggcgaaagtctggcgtcaggctatcgaccgttgtaaggccgatccgcaaaactttgtaccgcaaagcgcgtggatggagacgctcgggtcgatgtccgaaggcacgcaaaccactcttggcgcatatcaccgtaaatggcagtgagaaaagcaatgaaatattccttagggccagtgctgtggtactggccaaaagagacgctggaagaattttatcagcaggccgccaccagcagcgccgacgtgatttatcttggtgaagcggtatgcagcaagcgtcgggcaaccaaagttggcgactggctggagatggcaaaatcgctcgccgggagtggtaagcagattgtgctctccacgctggcgctggtgcaggcatcatctgaactgggcgaactgaaacgctatgttgagaacggtgagtttctgattgaagccagcgatctcggcgtggtgaatatgtgcgctgaacgcaaactgccgttcgtcgccgggcacgcgctgaactgctacaacgcggtgacactgaaaatattgctcaaacagggcatgatgcgctggtgtatgccagtggagctttcccgcgactggctggtgaatctgcttaatcagtgcgatgagctgggcattcgtaaccagtttgaagtggaagtcctgagctacggtcatctgccgctggcctactccgcccgctgctttaccgcgcgttcggaagaccgcccgaaagatgagtgtgaaacctgctgcattaagtatccgaacgggcgcaacgtgctgtcgcaggaaaaccaacaagtgtttgtactcaatggcattcagaccatgagcggctacgtttacaacctcggtaacgagctggcatccatgcagggcctggttgatgtggtccgcctgtcaccgcagggtactgacactttcgcgatgctcgacgccttccgcgctaatgaaaatggcgctgcaccactgccgttgacggcgaacagcgactgtaacggctactggcggcggctggcaggactggagctgcaagcctaagtaaatagctcactttgttaacaactttaactactctttaatgcagtattaaagattaatcggtaacaaagtgagctgttatgactgataaaaccattgcgttttcgctactcgatctggcccccattcccgaaggttcttcagcgcgagaagcattctcccactctctcgatctcgcccgtctggctgaaaagcgcggctatcatcgctactggctggcagaacaccacaatatgactggcattgccagtgctgccacgtcggtattgatcggctatctggcggcgaataccaccacgctgcatctggggtctggcggcgtgatgttgcctaaccactcaccgttggtcattgcagaacagttcggcacgcttaatacactctatccggggcgaatcgatttggggctgggtcgtgctccgggtagtgaccaacggacaatgatggcgctacgtcgtcatatgagcggcgatattgataatttcccccgcgatgtggcggagctggtggactggtttgacgcccgcgatcccaatccgcatgtgcgcccggtaccaggctatggcgagaaaatccccgtgtggttgttaggctccagcctttacagcgcgcaactggcggcgcagcttggtctgccgtttgcgtttgcctcacacttcgcgccggatatgctgttccaggcgctgcatctttatcgcagcaacttcaaaccgtcagcacggctggaaaaaccatacgcgatggtgtgcatcaatattatcgccgccgacagcaaccgcgacgctgaatttctgtttacctcaatgcagcaagcctttgtgaagctgcgccgtggcgaaaccgggcaactgccgccgccgattcaaaatatggatcagttctggtcaccgtctgagcagtatggcgtgcagcaggcgctgagtatgtcgttggtaggtgataaagcgaaagtgcgtcatggcttgcagtcgatcctgcgcgaaaccgacgccgatgagattatggtcaacgggcagattttcgaccaccaggcgcggctgcattcgtttgagctggcgatggatgttaaggaagagttgttgggatagtgtgtcttaacgcgggaagccttatccgagctggcaacgctgtcctacatagacctgataagcgaagcgcatcaggcattgtgtaggcagcagaaatgtcggataaggcaccgctgattactgatacaccggcagtaaattaaagctcgataaaatatgcaccagtgcgttgccgacgccaaacaccagaatcagcgcaatcatcggcttgccaccccagacgcggaatttcgggctgccaaagcgtttacgcgatgcacgggctaacagcgccggaacaattgccgcccagatggtagccgctaaaccagcataaccaatggcgtacaggaatccgttcgggaacaacagcccccccacaactggcggggcaaaggtcagcaatgccgttttcaagcggcccacagccgagtcgtcgaaaccaaacagatctgccagatagtcaaacaaacccagcgttacgccgaggaacgaactcgctaccgcaaagtttgagaacacgaccagcagcagatccagactacggctgttcagtacgccgcttaacgcctgtaccagcacatcaatattaccgcccttctctgcaataccgataaactccggacgcgggatgttacccatcgtcgccagcaaccagatggtatacagcgccagcgccatcagcgtaccgtacaccagacatttcacgatggttttcggatctttgccgtaatacttcatcaggcttggcacgttaccgtgataaccaaacgatgccagacagaacggcagggtcatcaacagatacggtgcataagacgcattgctttcggcgacgttgaacaatgtcgcaggctgcacatgccccagcaggctaccaaaggtgaggaagaaggtaatgactttcgcccccagcacaatcgctgtcatgcgactgacggctttagtgctcaaccacaccacaaacgctaccagcaatgcaaaaccaaaacccgccgcccgtgccgggacgtttagtgacatctctgcgaaggtgtgatgcagaatcgaaccactggcagaaatataggcataggtcaggatatagagcacaaaggcaatggaaatgccgttgaccacgttccagcctttgcccagcaaatctttggtgatggtgtcaaaactcgaaccgattctgtaattcaggttagcttccagaatcatcaagccggaatgcagcatacagaaccaggtaaagatcagcgccgccattgaccagaaaaaccacgccccggacatgaccactggcagagaaaacatccctgcgccaataatggtgccgccgataatcaccacgccgccaagcagcgacggtgacgtttgggtggtggttagtgttgccatgagggcttctctccagtgaaaaatagtgcgactgcgttgttatgcattgcactgtaccagtacacgagtacaaaagacagaaaaaaagccccgatggtaaaaatcggggctgtatatattattttacagattgtgttcgctgttcagcgatgattacgcatcaccaccgaaacgacgacgaccggtagaatcatcacgacgcggagcgcggccttcacgacgttcgccgctaaaacgacgaccatcaccacggccaccttcacggcgttcaccgctgaagttacgaccgccttcacgacgttcgccaccgaaaccacgaccaccgccacgacgctcaccgccagtatgcggctgtgcatcgcccagtaactgcatgttcatcggcttgttgagaatgcgagtgcgcgtaaagtgttgcagcacttcacccggcatacctttcggcagttcgatggtggagtgagaagcaaacagcttgatgttaccaatgtaacggctgctgatgtcgccttcgttagcaatcgcaccaacgatatgacgaacttcaacaccatcatcgcggcccacttcaatgcggtacagctgcatatcgccaacatcacgacgttcacgacgcggacgatcttcacggtcaccacgcgggccacggtcgttacgatcgcgcggaccacggtcatcacggtcacggaattcacgtttcggacgcatcggcgcatctggcggtacgatcagagtacgttcaccctgtgccattttcagcagtgccgcagccagagtttcgagatccagctcttcaccttcagcagtcggctgaattttgctcagcagtgcgcggtattgatccagatcgctgctttccagctgctgctgtactttagcggcgaatttttccagacggcgtttgcctagcagttctgcgttcggcagttctacttccggaatagtcagcttcatagtacgttcaatgttgcgcagcagacgacgctcgcggttctcaacgaacagcagcgcgcggccagcacgacccgcacgaccggtacgaccgatacggtgaacgtaagactcagaatccatcgggatatcgtagttaactaccaggctgatacgctcaacgtccaggccacgggctgcaacgtcggtcgcaatcaggatgtccagacgaccatctttcaggcgttccagtgtctgttcacgcagcgcctggttcatgtcaccgttcagcgcggcgctgttgtagccgttacgctcaagagcttcagccacttccagagtcgcgtttttggtacgaacgaagataatcgccgcatcaaaatcttccgcttccaggaaacgtaccagtgcttcgtttttgcgcataccccagacagtccagtagctctggctgatgtcaggacgggtagtcacgctggactgaatgcgcacttcctgcggctctttcataaagcggcgggtaatgcgacgaatcgcttccggcatggttgcagagaacagagcggtctgatgaccttccgggatctgcgccataatggtttcaacgtcttcgatgaagcccatgcgcagcatttcgtcagcttcatccagaaccagaccgctcagtttagagaggtccagagtgccacgtttcaggtggtccagcagacggcccggagtaccgacaacgatctgcggcccctgacgcagggcgcgtaattgcacgtcataacgctggccgccgtacagagcaaccacatttacgccgcgcatgtgtttagagaaatccgtcattgcttcagcaacctgtaccgccagttcgcgggtcggtgccagcaccagaatctgtggtgctttcagctcaggatcaagattctgcaacagaggtaaagagaatgctgcagtttttccgctccccgtctgggccatacccagaacgtcgcggccattcagcagatgtggaatacactctgcctgaattggagatggtttttcgtaacccagatcgttaagggcttcaaggataggagccttcaggcccagatctgcaaaagtggtttcgaattcagccatgtagtacgtgtgcctcaaaattaatggcggccagtctacataactcatcatgaaattgatcagcaattttcattgaaaagtgtgaaccggctcaaagtaggtgtattaacgaacaacaacgccctcacccgttaaggtgatggcaatcaaaaaagattacgggctgatgtgtacgtcagctattgctggtccgattctgccaggtcatcttggtcctggcccaggagcgataattccaacaatgcgtatcggtgctcaacaaagttatgaacgttgttggcaaccgccagtttgaacagtgccgtggcgctgtccaaatcccccagacttaggtagtacttacctaaatagaagttggtttcactgagatgctcagcgagcgaggtgttatccgttgcgtccgccttgagcctttccattaacgtttgttcgctaatgttgcccaggtagaactcgacaatgttccatccccactgttccttatccgatttttcgaagtgctgtttcaacacttctttagcctgcttctcatcgagcttctgctcggcgagataaagccacagactacggaaaggatcattgggatcgtcttgataaaacgccagcagatcatcttgcgctaacttgtcacgaccgccgtaatataatgcgatcccgcgattcaagtgcgcgtagttgtaagttggatcaagctcaagtacagaatcaaacgcttcataggcagcatcaaaattgcctgcctgcgttaaatatatgcctaagtaattgaatacttcaggcatatccggtcggattgccagcgcttgcgaaaaatcgttacgcgctaatgccctcagaccgagactatcatacaacactccgcgctcatataaaagctgtgcgcgttcgtcatcggttaaagcccgactggcaaggatttgttccatacgtgccagaatcacttcctgctgtaaagtcggttgcaatggtaccgcgaggacttcacttttacgccaggaagtattactgcatcctgcaagcgtaagtgctgtcgcaacgaaacaccagcgcaaaaaaggcttcatttcccactcccgaagaccacggttgaatgaacgtcctgttcccggttgctaacaaggcgtcctgcccggttaaaagccccccgccgcagcggagggcaaatggcaaccttactcgccctgttcagcagccggagcttccggtgctgcagcaggttgagactgctcagtcgcttctttaatgctcagacggatacggccctggcgatcaacttccagaactttcaccggtacttcctgacccatctgcaggtaatcggtcactttctcaacgcgtttgtcagcgatttgagagatgtggaccagaccttctttaccgccgccgatggcaacaaatgcgccaaagtcaacgatacgggtcactttaccagtgtagacgcggcccacttcgatttctgcagtgatctcttcgatacgacgaatagcatgtttcgctttctcgccgtcggtcgctgcaatcttcacagtaccgtcatcttcgatttcgatggtggtgccagtttcttcggtcagagcacggattacagaaccgcctttaccgataacatctttgatcttgtccgggttgatcttgatggtatggatacgcggtgcgaactcagagatatcgccacgcggcgcgttgatcgcctgttccattacgcccaggatatgcagacgcgcacctttagcctggttcagcgcaacctgcatgatctctttggtgataccttcaattttgatatccatctgcagtgcagagataccgtcgcgggaacctgcaactttgaagtccatatcgcccaggtgatcttcgtcgcccaaaatgtcagacagtacaacgtagttgtcgccttctttcaccagacccattgcgatacccgcaacggcagctttgatcggcacacctgcgtccatcagcgccagagacgcgccgcacacggaagccatagaagaggaaccgttggattcagtgatttcagacacaacacgtacggtgtacgggaatttgtccatatccggcatgactgccagcacgccgcgcttcgccagacgaccgtgaccaatttcacgacgcttcggagaaccgaccatgccggtttcgcctacggagtacggagggaagttgtagtggaacaggaaggtatcggtacgttcgcccatcagttcatcaagaacctgcgcgtcacgagcagtacccagcgttgcggtaaccagcgcctgcgtttcaccacgggtgaacagcgcagaaccgtgagtacgcggcagcacgccagtacgcacatccagaccacggatcatatctttttcacgaccgtcgatacgcggttcgcctgccagtacgcggctacgaacaacgtttttctcgatcgcgtgcagaatttcacccagttcgttttcgtccagggtttcgtcttcagcaagcagcgtcgcgatggtttcagatttgatgacatcaacctgcgcataacgctcttgtttgtcggtgatgcggtaagcatcgctcaggcgagcttcagccagtgcagcaacgcgcgcgtttagcgcttcgtttaccggctccggctgccagtcccaacgcggtttaccggcttctttcaccagttcattgatgttctgaataacaacctgctgttgttcatgaccgaacactactgcgcccagcatctggtcttcgctcagcagttgagcttcagattcaaccatcagtacagcggcttcagtaccggcaacaaccagatccagtttgctctctttcagctcgtcctgagtcgggttcagtacgtactggtcattgatgtaacctacgcgggcagcaccaatcgggccattgaacggaataccagacagagacagcgctgcggaagcaccaatcatcgcgacgatatccgggttaacttgcgggttaacagaaaccacggtggcgataacctgaacttcgttgacgaagccttccgggaacagcgggcgaatcgggcggtcaatcagacgcgcgatcagggtttcgccttcgcttgggcggccttcacgacggaagaagctacccgggatacgaccagcagcgtaggtacgctcctgatagttaacggtcagtgggaagaagtcctgacctggtttggcttttttctggccaacaacggtaacgaataccgcggtgtcatccatgctaaccataacagcggcagtagcctgacgagccatcatgccggtttccagagtcacggtgtgttggccgtactggaatttacgaacgatcggattaagcaatgtaatatcctttctctttcttagacagtaccttacggcactggtgttaatacccgatcttctgcgcatcctcgcgactaatgacaaccctaacccagctctatgtgggtaaagcctctcattagccgcgcgaacctctgcaacggaagatcattcatagcaacaatacattagtttccagtgaattgctgccgtcagcttgaaaaaaggggccactcaggcccccttttctgaaactcgcaagaattagcgacgcagacccaggcgctcgatgagctgggtgtaacgtgctacgtctttacgtttcaggtagtcgagcagtttacgacgctgagaaaccatgcgcagcagaccacgacggctgtggtgatcttttttgtgctctgcaaagtggccctgcaggtggttgatctgtgcagtcagcagtgctacctgaacttcggtagaaccggtgtcgtttgcgtcacgaccaaactcagaaacgattttagctgttgcttcagtacttagagacattttaaaactccaaagtatatagaatgaaaggacgccgatctctaattcagcgatcccagtgtacgttacgcaaagtgttaaacaatttacgcgacgttaagcggcagtattctactcgtagcgacctgttatcgcaagacggttaacattacgccgggtattcaaccaccaggcgacgaggcgcaacgcggccttcatcgtcaatttcgcccataccgataaatttgccgttctcaccttccgtgacgcgaaccagtccttccagtggcgcaccagatgtacgaaccgggttaccatttttgaagtaaacagaagacgttaacggaagattcaccaccggatagtccgaagctggactgtccattggcatcagtaatggatcaagtaactccgcggctggaatatcctgctgttcagcttgctcaacaagttcacgcaggtgctccagggtcaccatccgttcaaccggatatttacttaccgccagacggcgcaggtaaataacatgcgcgccacagccgagtttttcacccaggtcatcaatgatggtgcggatataagtgccttttgagcagtgaatttccagctccagctcattgccttcatggcgaataaacagcaattcataaacggtaatcggacgcgcttcacgcggaacttcaatgccctgacgcgcatattcgtacagttttttgccctgatatttcagtgctgaatacatcgaagggatctgttcgatatcgccacggaaagtatccagtgccgctgccagctgctctgcgctaaaggttaccggacgttcttcaacgatctgtccgtcggcatcagaagtatcggtacgctgtccaagacgcgcaatgacccgatagcgtttgtcggagtccagcagatactgggaaaacttcgtcgcttccccgaggcaaatcggcaacatgccggtcgccagcgggtccagcgcaccggtatgcccggcacggttggcgttatatatacgtttcactttttgcagcgcatcgttgctggacataccctgaggtttatccagcaacaaaacgccgttaatgtcgcgaccgcgacgacgaggacgactcattagtcctccttgctgtcgtccgggttaacacgacgttcttcgtcatgtttgaccacgctggtcaccaggtttgacatgcgcatcccttcaaccagagagttgtcgtagaagaaggtcagttccggcacgatacgcaggcgcatcgctttccccagcaggctgcggatgaaaccagaagcttcttgcaacgctttgatgcccgctttaaccgcgtcttcatctttgtcgttgaggaacgtcacatatactttggcatacgccaggtcgcgagacatttcgacaccggaaacggtggtcatcatgcccaggcgaggatctttaatttcacgctgcaggatgagagcgatctctttttgcatttcctgcgctacgcgctgcgggcgaccaaattctttcgccataataaattctcctgacaaaaaaggggctgttagcccctttttaaaattaatttcaggtggaagggctgttcacgttgacctgataagacgcgccagcgtcacatcaggcaatccatgccggatgcagcgtaaacgccttatcccgcatggaaccctaaaaaccttaagcaatggtacgttggatctcgatgatttcgaatacttcgatcacatcgccagtgcggacgtcgttgtagttcttaacgccgataccacattccataccgttacggacttcgttaacgtcatctttgaagcggcgcagggactccagctcgccttcgtagataaccacgttgtcacgcagaacgcggatcgggttgtgacgtttaaccacaccttcggtaaccatacagcctgcgatggcaccaaatttcggcgatttgaacacgtcacgaacttccgccagaccgataatctgctgtttcagttccggagacagcataccgctcatcgccgctttcacttcgtcaatcaggttatagatgacggagtagtaacgcagatccaggctttccgcttcaatcactttacgtgcagaggcatcagcacgtacgttaaagccaaccaggatggcgttggacgccgcagccagggtggcgtcggtttcggtgataccacctacgccagaaccgatgatcttcactttaacttcgtcagtagacagtttcagcaaggagtcggagatcgcttcgacagaaccctgtacgtctgccttcaggacgatattcacttcgtgaacttcgccttcggtcatgttggcgaacatgttctcgagtttagatttctgctgacgcgccagtttaacttcgcggaatttaccctgacgatagagtgcaacttcacgcgctttcttctcgtcacgtacaacggtaacttcatcacccgcagccggtacgccggacaggccgaggatttccaccggaatggacggacccgcttccagcacttcctgacccagttcgttacgcatcgcacgaacacgaccgtattcgaagccacacagaacgatatcgcccttgtgcagagtaccttcacgtaccagaacggtagcaaccggaccacgacctttatcgaggaaggattcgataaccgcaccgctcgccatacctttacgtaccgctttcagctccagaacttccgcctgcagcaggatagcgtccagcagttcatcgataccggtacccgctttcgcagatacgtgtacgaactggctttcaccgccccactcttccggcaggatgccgtactgggagagttcgttcttaacgcgatccggatcagcttctggtttatcgatcttgttcactgcaaccaccaccggtacctgcgccgctttcgcgtgctggattgcttcgatggtctgcggcatcacaccgtcgtcggcagcaacaaccaggactacgatgtccgttgcctgcgcaccacgagcacgcattgaagtaaacgcggcgtgccccggggtgtccaggaaggtgatcatgccgttttcagtttcaacgtggtatgcaccaatgtgctgggtaatgccgcccgcttcgccagaggccactttcgttgaacgaatgtagtccagcagagaggttttaccgtggtcaacgtgacccatgatggtcacaaccggcgcgcgcggttcagccgcagcacccgtgtcacggtcgctcattaccgcctcttccagctcgttttcacgacgcaggataactttatggcccatctcttcagcaaccagctgtgcggtttcctgatcgataacctggttgatggttgccattgcgcccagtttcatcatcgctttgatgacctgagagcctttaaccgccatcttgttcgccagttcgccaacggtgatagtttcgccgatcacaacgtcacggttaacggcctgagcaggcttctggaagccttgctgcagcgaagaacctttacgttttccgcctttaccgccacgtactgctgcgcgtgcttcttcacgatcagcttttgattcagcgtgtttgttgcctttcttcggacgcgctgctttcgcgttacgaccacggccacggccgccttcgacttcacgatcgctttcgtcttctgcctggcgagcatgttgagaagtagtgacgtgataatcgctggaatcttcagtcggttccgcgttatcagtccatttgttttcttccgccatacgacgtgcttcttcagcaacgcgacgtgcttcttcttcgagtttacgacgcgcttcttcttcagctttacgcttgagctctgcagcttcctgctcacggcgggctttttcagcctgggcgtttttagtcatatcgtcttgttgattgctcactttgtctttttccgcagcttcacgtttcgcttgttcagcagcttcacgcttagcttgttctgcggcctcacgttcagctttttgttgcgcctcgcgtttagccgattcttctgcctcacgacgggcttgctcttccgcttcacgctgcgcttgctcttccgctgcaaggcgttcagcctcttgcggatcgcgtttcacaaaggtgcgtttcttgcggacttcgatttgtaccgatttgctttttccaccggtaccaggaatgttaagggtgctgcgtgttttacgttgcagcgtcaatttgtccgggcctgaatttttctgattcaggtggtcaatcaaagtctgtttctcttgtgcagacacagagtcgtcagcagacttccggatacctgcatcagcaaattgctgtaccaggcgttccacggaggtctgtcgctctgcggccagcgttttaatcgttacatctgtcatgctgttccttcctgctacagtttattacgcttcgtcaccgaaccagcaaatattacgggcagccataatcagtgctccggctttttcgtcggtcaacccttcgatatcagccagatcatcaatgccctgttcggcgagatcttccagcgtacaaacgccacgggcggccagtttgaatgccaaatcacgatctaccccttcaaggttcagcagatcgtcagccggtttgttatcaccgaggctttcttcctgggcctgtgcaatggtggccagtgcatttttagcacgctcgcgcagtgcttcaacggtcggctcatcaaggccttcgatttccaacagctctttcatcggcacataggccaattcttccagcgtcgagaagccttcttctaccagaacagtcgcgaagtcttcgtcgatgtcgagatatttggtgaaggtgtcgatcgctgcgtgcgcttccgcctgatgcttagcctgcaggtcgtcaacggtcatcacgttgagttcccaaccgctcagctgcgaagccagacgcacgttctgaccgttacggccaatcgcctgcgccaggttaccggcttcaacggcgatatccatggtgtgtttatcttcatccaccacgatagaagcaacgtctgccggtgccattgcgttaatcacgaactgcgccgggttatcatcccacaggacgatatcgatacgctcgccacccagttcagtagacaccgcctgaacacgcgcgccacgcatacctacgcaagcacctaccggatcgatacgtttatcgttggttttcaccgcgattttcgcacgagaacccggatcgcgagccgctgctttaatttcaatcacttcttcgccgatttctggcacttcaatacggaacagttcgatcagcatttccggcttggaacgagtgacgaacagttgcgcgccacgcgcttccgggcgaacggaatagagcacgccacgaacgcggtcgccagggcggaagttttcacgcggcagcatatcttcgcgcaggatcacggcttcagcgttgttgcccagatccagagagatgttgtcgcggtttacttttttcaccacgccggtgatgatttcaccttcgtgttcacggaactgatcaaccaccatcgcacgttcggcttcacgcactttctgcacgataacctgttttgccgtctgggtagtgatacggtcaaaggtaacagactcaatctgatcttcaacgtaatcgcccaggttcaggctttcatcttcataacgtgcggcttcaagggtgatttccttggtcggctgggtgacttcatcaacaactaaccagcgacggaaagtgtcaaaatcaccgcttttgcgatcgatctgtacgcggacgtcgatctcttgttcatattttttctttgttgctgtcgccagcgcgctttccaatgcttcgaaaatcttctcgcgaggtagcgccttttcattggatacggcttcaactacagccaaaatttctttgttcatcgcgggcttttcacctcatccagactattaaaagtggggaaccaggttcgccttctggatattactcagcgcgaacacttcatctttaccttcgacggtaactgtgatcatttcaccgtctaccgctttgataacgccctgccatttacgacggttttgtaccgccatacggagaaccagagtcacctcttctccgacaaaacgggcgtagtgttcagccgtgaacagtgggcgatcgagacccggtgaggagacttccaggttataagcaacggtgatgggatcttcaacatccagcacagcacttacctggtggctcacatcagcacaatcatcaacattgatgccatcttcactatcaatatagatgcgcagtgtggatgtgcgaccgcgaataaattcgatgccaaccagttcaaaacccagggcctcaactggcgcagtaatcatctctgttaatttttgctctaatgtggacaagcccacccccaagacataaaaaaagggcctaaagcccagttattctgtagtcagataacaaaaaaccccgataaatcggggctttatataactgaaccctataaccgcaactgcggtctggagcactttccagaaggattttttcaaatcccactacgaaggccgaagtcttcacagtatatttgaaaaaggactctaagggaaagtggttgcgggggccggatttgaaccgacgatcttcgggttatgagcccgacgagctaccaggctgctccaccccgcgcctgaaacgtggcaaattctactcgttttgggtaaaaaatgcaaatactgctgggatttggtgtaccgagacgggacgtaaaatctgcaggcattatagtgatccacgccacattttgtcaacgtttattgctaatcatgtgaatgaatatccagttcactttcatttgttgaatacttttgccttctcctgctctcccttaagcgcattattttacaaaaaacacactaaactcttcctgtctccgataaaagatgattaaatgaaaactcatttattttgcataaaaattcagtgagagcggaaatccaggctcatcatcagttaattaagcagggtgttattttatgacgacgattctcaagcatctcccggtaggtcaacgtattggtatcgctttttctggcggtctggacaccagtgccgcactgctgtggatgcgacaaaagggagcggttccttatgcatatactgcaaacctgggccagccagacgaagaggattatgatgcgatccctcgtcgtgccatggaatacggcgcggagaacgcacgtctgatcgactgccgcaaacaactggtggccgaaggtattgccgctattcagtgtggcgcatttcataacaccaccggcggcctgacctatttcaacacgacgccgctgggccgcgccgtgactggtaccatgctggttgctgcgatgaaagaagatggcgtgaatatctggggtgacggtagcacctacaaaggaaacgatatcgaacgtttctatcgttatggtctgctgaccaatgctgaactgcagatttacaaaccgtggcttgatactgactttattgatgaactgggcggccgtcatgagatgtctgaatttatgattgcctgcggtttcgactacaaaatgtctgtcgaaaaagcctactccacagactccaacatgcttggtgcaacgcatgaagcgaaggatctggaatacctcaactccagcgtcaaaatcgtcaacccgattatgggcgtgaaattctgggatgagagcgtgaagatcccggcagaagaagtcacagtacgctttgaacaaggtcatccggtggcgctgaacggtaaaacctttagcgacgacgtagaaatgatgctggaagctaaccgcatcggcggtcgtcacggcctgggcatgagcgaccagattgaaaaccgtatcatcgaagcgaaaagccgtggtatttacgaagctccggggatggcactgctgcacattgcgtatgaacgcctgttgaccggtattcacaacgaagacaccattgagcagtatcacgcgcatggtcgtcagttgggccgtctgctgtaccaggggcgttggtttgactcccaggcgctgatgctgcgtgactctctgcaacgctgggttgccagccagatcactggtgaagttaccctggagctgcgccgtgggaacgattattcaatcctgaataccgtctcagagaacctgacctacaagccagagcgtctgacgatggaaaaaggcgactcggtgttctcgccagatgatcgtattggtcaattgaccatgcgtaacctggatatcactgatacccgcgagaaacttttcggttatgccaaaactggcctgctttcctcctctgccgcttcaggcgtgccgcaggtggagaatctggaaaacaaaggccagtaattcgacatcaaccctgcccttcaggggtggggttaccttgcttatcctctgtaaactcctttctgagcatcacataatcgaaaacatcatggtttgcatccacaacccgtgagtctcctttatagtgtgcaatcacttcctcaagcgtttgcggctgttccggctttgttacccccatccacgcattaataaggtaattattgtaagctgtcgaaaagatgttgttttccgttgtgcgatccacgccatccccaagaacggggctataccagataaacatcgggacatgatatgcctgctggctagcctccctgcctccatgaaaatagacgttcttcttcgtagggtcacgttccaggccgtggtcggcaaaatacatgaccgaggcgcggcgatcttttaataattcaaaaacctgacctagcaaactatctgtgtaatgaatggagttgtcatagcaggcatcctgatcgtcctgcggttgaaacacggcgctggattgcggataggcgctacaagccggttcatggcttccatttaaatgaagaacaatcagtttcttttgctgcgtattttgctgtaatgcttgcgataaatgcggcaacaacaattcatcaaatcctctgacataaactgtttccatggcgcgcatggcgatactggtaactgctgtaccattctgccgaaaagcggattgcgagcttagccagaaagtctgaaatcctgcttgattagccatattaataatgttgtcggggtaattatgaatgtcatgactcaaaacagaatcagcagttaaagaaaggggaaccgacagcgcagtgtaaggtgcgccgcttattgcttgattaaacagtttgatctgttttctttgtgcttcaacttgcggtgtcgtagagcgtgtatatccatacaaagacatattgtcgacacgtacagactcccccacaatcaacacgtaggtatcaatacctgtatccctgactgataattgaaaatacggcaccgtgtttgcaattgagagtaatctttgatgctctttcgctgctaaagcaaaatagttgagattgaaaaacggcgtataggtagcaaatcgcgacgctagtatatatggactgaacgcttttttattttttgcatctttataagcaaattgacaagcggaaaataaactgcccgaaatgacaatcagcaataatattcctgtcactttttttgtcggcaaggaaacatcatattttattattactgccaaaaaaagaagggataaaaaagcaaaggcacatagataagggatatacatccccagcattttgacaacttcatccggatcactctggagcacactaatcgcaaatccatcattgaaagttgtaccaaaggtacaccatgaatagaggctaatactcatgtctgccgcagtcagtaacacaaatggtgcggcaacaagcaggcgaagcggaagggatgatatacgttttacaaccaggatggtcagaacgaagaacagcaagcgctgaaccatatgcgctccggaagaagcgactaagttcgtaataccaaaaacaataacacaaagatacaacaaccaatgagatttaaaagttctagcaaatttgttgaatactgtcatccagaaatccaagttcacaaccaatataaacaattatcaacaatgtttaattttatatcagacatgtttttcaactctgatccatatcagaacgaaacactgttagttttttctttttaaatgatgcggccattgcgttctcagtaattaaataacattatcaatgcgtctctaaacattacgcagaacgtagccatcagtcgttatactgacaggagcaggatggtttatcgagaagtaaacatatccgtattcgtaccggaactggagttgacacaataaagtgccaattatgtcagtagaagggaaaaatttataactaaggcgtaccggcaccatcgtttcaaggtaccagctacgagtaaagcaactggacgagatacagatacctgacaaccattcctcagaccaggaccaaaacgaaaaaagacgcttttcagcgtctcttttctggaatttggtaccgaggacgggacttgaacccgtaagccctattgggcactaccacctcaaggtagcgtgtctaccaattccaccacctcggcacggatactactttttagttcgggatatcgctggtcggcttagccggagcagctggctgagtttgttcggttttcgccggtgcactcagattttcccattcgctacctttattggttttgttgctattgatgttacccagcaccagactgatgatgaagaataacgttgccagcagcgccgtcatgcgggtcatgaagttaccagaaccacttgaaccaaacagcgtagcggaagcgcctgctccgaaggaggctcccatatcagcgcctttaccttgctgcagcatgatcagaccaacaaggccaattgccacaataaggaaaactactaaaagagcttcatacataatcaacctgttccttgcggagttgccgcgtaccaatgcttcaaccaataaagcgggagtttttaatctttcccactgaagcgggtgtgaatactaaccaaagcgaatgaccttcgcaagggcaattttatcgcattgtatcaactgcggaaaaaaacagcaaaaccgatgtgttcgctgagaaaaaaggcgacaatcgccgcctttttagccagttatctaacgctttaaacggcttttactgcatcggcgatgcggtgtgcaaattcagtcacctgcgcttcgtcttcgccttccaccatcacgcgaattaacggttcggtgccggatttacgcagcaacacgcgtccacggttgcccagcgcagcttcaacctctgcggtcacggctttaactgactcatgctcaagtggatcgccgctacctgcggtgtaacgtacgttaaccagaatctgcgggaacattttcatgccgctgcaaaggtcgtgcaggctcatatggttacgtgccatcgccgccagcacctgcaagccagcaacgatgccgtcaccggtagtagttttatccagcaggatcacatgaccggaattctctgcaccgatacgccagcctttctcctgcattttttccagtacgtagcggtcacccactttcgcgcgcgcaaatggaattcctaactgtttcagcgccagttcaagccccatgttgctcatcaatgtacccacagcgccaccacgcagctggccctgacgaagaccttcacgcgcgatgatatacatgatctgatcgccatcgactttattgccttcatggtcaaccataatcacgcgatcgccatcgccgtcgaaggcaataccgagatccgctttttcagccagcacacgagcctggagcgcgcgaacgtcggtagcccccacttcggcattgatgtttacaccgtttggctcacaaccgatagcgataacgttcgcccccagttcgcgcagcacgttcggcgcgatgtgataagtcgcaccgtttgcacaatccaccacaatcttcagttcactgaggctaagttcgttcgggaacgtggctttgcaaaactcgatatagcgacccgcggcatcaacgatacggctggctttacccagttctgccgaatcaacgcagctgatctccttttccatttccgcttcgatggcctcttctaccgcatccggcagtttggtgccgtcgatagagaagaatttaatgccattatcgtagaacgggttatgcgatgcagatatcacaattccggcctctgcgcggaaggtacgcgtcagataagccacggccggtgttggcatcgggccagtgaagagtgcggaaaggcccgctgccgccagacccgcttccagtgctgactccagcatatagccagaaatacgcgtgtctttaccaataataatcttacgggagccgtggcgcgccagcactttacccgcggcccaacccagcttaagcacaaaatcaggtgtgatcggcgcatcccctacacgaccacgaatcccatcggtaccgaaatatttacgattactcatagcgtttgttttcctttgcagacagagtggcttccaccacccgcatcgcttctacggtttctttgacgtcatgaacacgaatgatgtgcgcgccttgcattgcggcaatgaccgcacaggccagactaccgctcaggcgctcggacggccccacgttcagcagctgcccaatcatcgattttcgtgacatacccaccaacagcggcaggttgaaatggtgaaattcagccaggcgcgccagtaatgaatagttatgggagagatttttaccgaaaccgaatccggggtcgagcaacaatttctcttttgcgatacccgcctgctcgcaacgtgctatttgctcaataaagtagcgattcacttctgcaaagacatcgtcatacttcggagcttcctgcatggtttttggatttccctgcatatgcatcagacaaaccggtaaaccggtttctgcagccgcctccagagcgccaggttcggaaagggagcggatatcattaataatgtgagcgccaactttcgctgactcacggatgacttctggtttggatgtatcgactgagatccagacttcgaagcgttgagcaattgcctcaaccacaggaataacacgttgcaactcttcttcaacgctaacttccgccgcccctgggcgcgtggactcgccaccaacgtcaatgatcgtcgcgccagcgttgatcatcagattcgcatgtttcaccgcatctatcagcgagttatgcgtgccaccatccgaaaaggaatcaggcgtgacgttgaggatccccattacgtgaggatggctaaggtccagtgaagtaccctgggcaaagagtttcatgatgttatccctggtatgaattgataagaaaaaaccccggagcacgccccggggttttcggtacaaatacagtcatctgatgcgggaacttacttgtcgcctaactgctctgacatggtgttacccgggttcggcgtacgcggttcatcaaccggacgaggagcctttggactaccattgtcgccagaattgttagaagcgcctggttcttcccagcccgctggcggacgtacatcgcgacgtgccatcaggtcatcaatctgcggtgcgtcgatagtctcatatttcatgagagcatctttcatcgcatgcagaatatccatattgtcggtcagaagctgacgcgcacgattatagttacgctcaatcagtgctttcacttcctggtcgatgatacgtgcagtttcatcggacatatgtttcgctttcgctacgctacggccgaggaacacttcaccttcttcttccgcgtacagcagtggacccaatttctcagagaagccccactgagtcaccatgttacgtgccaggttggtcgcaactttaatatcgttggacgcaccggtagatacatgttccggcccgtagatgatctcttctgccagacgaccaccgtacagcgtagaaatctggctttccagtttctgacggctggcgctgattgcgtcgccctcaggcaagaagaaagtcacacccagcgcacgaccgcgtgggataatcgtcactttgtgcaccggatcgtgttccggcaccaggcgaccgataatcgcatgacccgcttcgtggtaagccgtcgattctttctgcgcttccgtcatcaccatggagcgacgttccgcacccatcatgattttgtctttcgctttctcgaactcaaccatcgacacaacgcgtttgttgccacgagcagcgaacagtgccgcttcgttcaccaggttcgccaggtcagcaccggagaaaccaggagtaccacgggcaatgattgccgcgtcgatatcgggtgccaatggtacgcgacgcatgtgaactttcaggatctgctcacgaccgcgaacatctggcaagccgaccacaacctgacggtcgaaacggccaggacgcagcagggccgggtcgagaacgtccggacggttagtcgcggcgataacgatgataccttcgttaccttcgaagccatccatctcaaccagcatctggttcagagtctgttcacgttcatcgtgaccaccgcccagaccagcgccacgctggcggcctacggcgtcgatttcatcgataaagatgatgcacggtgccgctttcttcgcctgttcgaacatgtcacgaacacgggatgcacccacaccgacgaacatttctacgaagtcagaaccggagatagtaaagaacggaactttcgcttcgcctgcaatcgctttcgccagcagcgttttaccggtacccggaggaccgaccatcaagacgcctttcgggatcttaccgccgagtttctggaagcggctcggctcgcgcagatactcaaccagttcagcaacttcttcttttgcttcgtcgcagcccgcaacgtcagcaaaggtcgttttgatctgatcttccgtcagcatgcgcgctttgctcttaccaaacgacatggcacctttgccaccgccgccctgcatttgacgcatgaagaagatccagacaccaatcagcaacagcatcgggaaccaggagatgaagatagaagccagcaggcttggttcttcaggcggttcaccgacaaccttgacgttcttggtcaacaggttatccagtaatttcggatcctgaaccggaatgtaagtggtataacggttactatctttcttggtaacgttgatttcacgtccgttgatacgcgcttcacgaacctggtcgttattgacctcttgtaggaaggtagagtaatccaccttacggccattagactcgctgggcccaaagctctggaatactgacatcagcacaacggcaatgaccagccagagtattaggtttttcgccatgtcactcaagggattaacctcttattacaactgtgttaaaaacagcgtcaggatactctatatccagcatctttcaaactttcgtctgaaatctcccggttagggtttacgcccggtcgctacaatatacacttcccgcgaacgtgcacgagaagagtccggcttacgaactttgaccttcgtaaacagggagcgaatttcccttagatactcatcgaaaccttcgccctggaacaccttcactacaaaactgccacctggcgctaatacatcacgacacatttctagcgccagttccaccagatacatggcacgggggatatccaccgccggtgttccgctcatgtttggtgccatatcggacatgacaacctggactttgctgtcgccaacgcgctccagcagtgctttcatcaccagttcatcacgaaaatcgccctgaagaaagtccacaccaacgataggatccataggtaaaagatcgcaagcgatgatgcggcctttgccgccaatttgggtgaccacatattgtgaccaaccacccggagcagcaccaaggtcgacaaccgtcattcccggtttaaagagtttgtcactttgctgtatttcatcaagtttaaaccaggcacgggaacgtaacccctttttctgtgcctgttgaacatatttatcgctaaagtgttcctgaagccagcggctggagctggcagaacgcttcttacctgtcatttaactttcccatggggataactcatcgtaaccaattgcgtaaatttttacgcgcctatttggtgatatatgggagatggcggtagaatgacccgttttcaatcccaacgtaagcaaaaaatacgatgaatctgagtactaaacaaaaacagcacctgaaaggtctggcacatccgctcaagccagttgttctgcttggcagtaatggtttgaccgaaggggtgctggccgagattgaacaagcgttagagcaccatgaactcatcaaggtgaaaatcgccaccgaagatcgcgaaactaaaaccttgatcgtggaagctatcgtgcgcgaaaccggcgcctgtaatgtacaggtcatcggtaaaacgctggtgctttatcgcccaactaaagaacgtaaaatctcgctgccacgctaagattatcctaaagttacacacatttgctgtgtaaaacgaggggttttccgcaggcaggagagcaaaatgccacgctctgttcgttgataaaaggccgcatagcggcctttttcctttctttacaatacatcaacatcttgagtattgggtaattcttacaggtattccaccttaattacttcaaattctacttcgccgcccggcgttttgatgaccacaacatcatcttcttctttgccgatcaggccacgagcaataggcgagtttacagaaatcaggttttgtttaaagtcagcttcgtcatcgccaacgatgcgataagtctgttcttcgtcagaatccagattcagcaccgttacggtagcaccaaaaataacgcgcccattgttgggcattttggtgacatcaatcacctgcgcgttcgacagcttggcttcgatgtctttaatacggccttcgcagaaaccctgctgttcacgagctgcgtggtattcggcgttttctttcaggtcgccatgctcacgcgcttccgcgatagcagcaatgatttcaggacggcgcacagatttcagaaaatccagctcttcgcgtaatttttcagcgccgcgtaaggtcatcggaatagcttgcatttgttatacctcttgaatattcctgatagggcaagtcttcacccaccccggctgttcggcctgcccggcataactccttaccgggaccagaagcaaaaaaataccgacccgggtacaagtcccaggtcagctacaattcacattttgatagtcattttaccctgaagttcccgaagggtcatcgtttactttatagggcgttgcgccgtagtatgacggctcgattccaggttgttagcgcgagattatgcgattttccagatttatcatcggattgaccagctgtatagcgttcagtgttcaggccgcaaatgttgatgagtacattactcaactccccgctggtgccaaccttgccctgatggtgcaaaaagtcggcgcgtcggcccccgctattgattaccacagtcagcagatggcgctgcctgccagtacccagaaagtgattactgcgctggcggcgttgattcaactcggccccgattttcgttttaccacgacgcttgaaaccaaaggcaatgtggaaaacggcgtacttaagggtgacttagtggcgcgatttggtgccgatccgacgttaaaacgtcaggatattcgcaatatggtcgcgactttgaaaaaatctggcgtcaaccaaatcgatggcaatgtgttgatagatacctccattttcgccagccacgataaagcccccggctggccatggaatgacatgacacaatgctttagcgctccgcctgccgccgccatagttgaccgcaactgtttctccgtctcgctctacagtgccccaaagcctggtgatatggcttttatacgcgtggcatcttattaccccgttacgatgttcagccaggtacgcaccctcccccgtggttctgccgaagcgcaatactgcgaactggatgtggtgccaggcgacctgaaccgctttacgctgacgggatgcctgccacaacgttctgagccgctcccgttggcttttgccgtgcaggatggagccagctatgccggtgcaattctgaaagatgagttaaaacaggcgggtatcacctggagcggaacactgctgcgccagactcaggttaacgaacctggaacggtagttgccagtaaacagtcggccccgctgcacgatctgcttaagattatgctgaaaaagtcggacaacatgatcgccgatacggttttccgcatgataggccatgcgcgcttcaatgtgcctggaacatggcgggccgggtcggacgccgtgcgtcagatcctgcgccagcaagccggtgtcgatattggaaacaccattattgccgatggttcagggctttcgcggcataacctgattgcccccgccaccatgatgcaggtgctgcaatacattgcccaacacgacaatgaacttaactttatctccatgctgccgctggcgggctatgacggctctttgcagtaccgtgcaggtctgcatcaggcgggcgtggatggaaaagtctcagcgaaaaccggttcgttgcagggggtatataacctggcgggattcattaccacagcgagcgggcaacgaatggcgtttgtgcaatatctttctggctatgcagtagaacctgcggatcagcgtaatcgccgtattccgttagtgcgttttgaaagccgtttgtataaagatatttatcagaacaattagtcaaaaagaaaccccggcacatggccggggcttcagattattgacaaagtgcgctttgtttatgccggatgcggcgtaaacgccttatccggcctacaaaatcgtgcaaattcaacatattgcaattctcttgtaggcctgataagcgtagcgcatcaggctgatttggcgtttatcatcagtgattaacgcttgtaaatgaactcaacgccttcttcgtcgtcttcgtcccagtcgtcatcccagtcttcatcatcctcttcagcaatctcttcaagctgctggcgatgataatcatcccacatgaattcgactttctctggctgtttcgcttcttcagcctgcacgaccgggttttcaatgataaaggtcatcacatcccagcagagatctttcacgcccagtccactcgccgcagagatcagataatatttatcttcccagcccagcgcctcagcgatcgctttcgctttctcttcggcttctaccttatccagcagatcgatcttgttgaacactaaccaacgcggtttcgtcgccagatcctggctgtatttttccagctcgctgataataatacgcgcgttttcaaccggatcggtgccgtcaatcggatcgatatcgatgaggtgcaacaggacgcggcaacgttccaggtgcttcaggaagcgaatgcccagacctgcgccttccgcagcgccttcaatcagtcctggaatatcggcaacaacgaagctcttttcgttgtccattcgtaccacacccagacttggcaccagagtggtaaacggataatccgccactttcggtttagccgccgataccgcacgaataaaggtcgatttacccgcgtttggcatccccaacataccgacgtcagccagcagcatcagctccagcagcagctcgcgcttatcgcccggcgtgccgttggttttctgccgcggtgtacggttaacggacgatttgaaacgggtattgcccagaccgtgccagccgcccttagcaaccagcagacgctgaccgtgtttggtcatatcgcccatggtttcaccagtaccctggtcgattacacgcgtacctaccggcactttaatcgtcacgtctttaccgcgcttaccggtacagtcgcggcttgcgccattctgaccgcgctctgcacggaaagatttttcaaaacgataatcgataagcgtgttcaggttctcgtcggcttccatccatacgtcaccaccatcaccgccgtcgccgccatccgggccgcctttcggaatatacttttcgcggcggaagctcacgcaaccattaccgccatcacctgcaacgaccagaatcgatgcttcatcaacaaacttcattttattctccgtaaatcattcgcctgcgcggggttgcgataccaccgttgtatgcttacgtaatccgccccaaatacgatgaccaatggcggaatacatcgcgcccgcaaccacgacaaacgcaccgagataacctaaaaggtttaacatcggtctggcgaagaaatcgggccaggccagtgataaaagatctgaaaaaaacagcgtaaacagtggggtgagcgtgatgatcgcgctcacctgcgctgcctgccagcgagccatcgcttccgccagggcgccatatcctaccaaggtattcagtccgcaaaaaattaaacatgcgagctgccagtggctaagctgcgctatcactccaggctttgccagagggaagagcgcaattgtacataaagtgtacagtaaaaacaggatctgcggtgaggccagccgacgcaataaaaccttttgcgccacgccataactcacccaaaccgtcgccgcaccgaccccaaagataactccccaggtgtaatcggtgagctttgtaaatatctcgaccagactggtgttaaaaaacatcaccaggccgctcaggagcatcaatgcccctacaacctgagtgctgcgcattttctctttgaggataaatacgctggcaaccatcatgccaactggcgagagttgcccaatcacctgcgaagcggtcggactcaggtattgcaaggatgagctgaacaggatgaagttcccaaacagcccggcggtcgccactgccaacaaaatcaaccagcgtggcttacgaaacacgcgtaatggcggcaacctcttcttcaccgcaagaatggcacccaggccaatactcgccatcaagaaacggtaaaacacgattgtcggaggttccatcacctccagcacctgcttcattgcgattggcaacgccccccagcaaattgctgtggtgagcgccaaaagaatgccaatgcctgcctgctgcttcataccgtattccctgcaaagcgcatttgcggattaacgtcgcaccatgcgcatttttaccggttatcgaatgtaaaaagccccgcaacgtgttgcggggctttcatccgttaccgggacgcgaaaaacttattcagcttcgatgctgataaatttacggtttttcgggcctttaacttcgaatttcactttaccgtctgctttagcaaacagagtgtggtcacgaccgcaacctacgttagcgccagcgtggaatttggtaccacgttgacgaacgatgatgctacccgccagaacggattcgccaccgaaacgcttaacgcccaggcgtttagcttctgaatcgcgaccgttacgtgtggagccgccagcctttttatgtgccatttgaaatctctcctcaggtcttaggcgctgatgccagtaattttcacatcagtgaaccactgacgatggccctgctgcttacgatagtgtttacgacgacgaaacttaacgattttaactttctcgccacgaccgtgagcaacaacttcagctttgattacgccgccatcaacgaaaggaacgccgattttgacttcttcaccgtttgcgatcatcagcacttcagcgaactcaacagtttcgccagttgcgatgtccagcttttccaggcgaacggtctgaccttcgcttactcggtgttgtttaccaccactttggaaaaccgcgtacatataaaactccgcttccgcgcacaccttttcaatgattcagagtgcgctataaatattcacaatagggcgcgaatattacgcaaaacgcacgcctttgacaagtgctacagtcaatacacgaagaaaaaaaacacaacttgtacggtaacgtttatctgtgccattttttcagtacaatcaccctatattcctaaccataaaccctaagttgcctttgttcacagtaaggtaatcggggcgaaaagcccggcttttgcgatgaatttagaaaaaatcaatgagttaaccgcgcaagatatggcgggtgttaatgcggcaatccttgagcagcttaattccgacgtccaactgatcaatcagttaggctattacatcgtcagcggcggcggtaaacgtattcgtccgatgattgctgtactggctgcacgagctgttggctatgagggaaatgcgcatgtcaccattgctgccctgatcgagtttatccacacggcgactctgctacacgacgacgttgtggatgaatcagatatgcgcaggggtaaagctaccgccaacgccgcatttggcaatgccgccagcgtgctggtaggcgattttatttatacccgcgctttccagatgatgaccagcctcggttcgctcaaagtgctggaagtcatgtcagaagccgtaaacgtcatcgcagaaggtgaagttctgcaactgatgaacgttaacgatccggacatcactgaagaaaactacatgcgcgttatctatagcaaaaccgcgcgtctgtttgaggctgccgcgcagtgttccgggattctggctggctgtacgccggaggaggagaaaggcctgcaggattatgggcgctatctcggcactgctttccagttgatcgacgatttactcgattacaatgccgatggcgaacagttaggtaaaaatgtcggcgacgatctgaacgaaggtaaaccgacgctgccgctgctgcatgcgatgcatcatggcacaccagaacaggcacagatgatccgtaccgccatcgaacagggtaacggtcgccatcttctggaaccggttctggaagcaatgaacgcttgtggatctcttgaatggacgcgtcagcgtgccgaggaagaagcagacaaagccatcgcagcgttacaggtgctcccggacaccccttggcgagaagcactcatcggcctcgcgcacatcgctgttcaacgcgatcgttaatcccctcccctcatcccgcgcagcgcgcgggatggttccagtaagttccataaaaacacttattcagctctataacacctgaaaaatagggatgtgcatctttatatattctgaatattcacactctttacaggaactttttagagcaataggccatcaggagtatagtgatgctcgacagaagaagtgttctgaatgaaagcgactaacttaaggagtgaggaaaaatggaaagtaatttcattgactggcatcccgctgacatcattgcgggtttgcgcaagaagggaacgtcaatggcggcggaatctcgcagaaatggtttgagttcctcaacgctggcgaatgcattatcgcgcccatggccgaaaggagagatgattattgcgaaagccctgggaactgacccctgggttatctggccatcacgctaccatgatccgcagacccatgagtttatcgacagaacgcagttgatgcgtagctacactaaaccgaaaaaatgagtggtctggcggtagccccgcgaacggggctgccagctctcagacgattattcgcctttcacacgctcaatatttgcacctaaagcgcgcagtttgtcttcaatgcgttcgtagccacgatcgatgtgataaatacgatcaaccaccgtcgtcccttccgcaatacagccagccagcaccaggcttgctgatgcacgcagatcggttgccataacctgtgcgccagaaagtttttcaacaccgtgacaaataacggtattgctttcgatttcggcgtgcgcgcccatacggctcagctctggcacatgcataaagcggttttcaaagaccgtttcggtgataaacccggtcccttctgccaccaggttcaacagcgtgaactgggcctgcatatcggtcgggaatgccggatgcggcgcggtacgtacgttaacagccttcggacgtttgccatgcatatccaggctaatccagtcttcgccgacttcgatgtccgctccagcgtcacgcagtttcgccagcacggcgtcgagagtatctggctgcgcgttacggcagataattttgccgcgagaaatcgccgccgccaccaggaaagtaccggtttcgatacgatccggcagaacgcgatagacaccgccgcctaaacgttccacaccttcgatgacgatacgatcggtgccctgaccgctaattttcgcacccagcgtaatcaggaagttcgcggtatcgacgatttccggttcacgcgctgcgttttcaataatcgtggtgccttccgccagggttgcagcacacatgatggtcaccgttgcgccaacgctgactttatccatcacgatatgtgcacctttcaaacgaccatcgacggaagctttaacgtaaccttcttccagtttgatggtcgcgcctaattgttcgaggccagaaatgtgtagatcaaccggacgcgcaccgatcgtacaaccgccaggtagtgaaacttgcccctgaccaaagcgcgctaccagcggccccagcgcccagatagaagcacgcatggttttaaccagatcgtaaggtgcgcagaatacattaacgtcgcgggcatcaatatgcacagaaccattacgttctactttcgcacccagctggcttagcagcttcattgatgtatcgacgtctttcagtttcgggacgttctggatctctaccggttcttccgccagtagtgcggcaaaaagattaggcagagcagcatttttagcgccggaaattgtgacttcgccctggagcttcgttggcccctgaacacgaaatttatccatttagtttgttctcagttaacaattcatatccgctaccggcgaatcgcccatagctcaaaagccgttcagtttgcgatcgcgcgcccactccgcaggggtatacgctttgatcgacacagcatgaatgcggttatccgcaatatattccatcagcggaccatagaccgtctgctgttttttaacccgactcatgccgtcaaacaactcacccacggcaataacctgaaagtggctgccatcgccggaaacgtggacttcctggagggagagagcgttcatcaacacgctctgaatttcattattttccatgggatcttcaatcatcagttaataaaccagcgaaacatcttagagcaaagttgcgctggcataaataagcaaaaagcctcgctgataaatcagacaaggctcgacttgcaggcaggtttgccggacaggcggttaacgccatatccggcctgaaaaaatttaacgaggcagaacatcagcaggcaaattatacaatttcgccagggtatacactttgtcgtttaccccctgaagcgtcacattgttgccctgctttttcgccagatcgataagatggagcagcagtgccagtccccccgtatccacgcgggagacacggctaagatcgatgcaggtaatccccttcaccgcttcctcacgcatttcccaaagcggtagcaaaacgtcctgatccagctctccggataacgccagcgtgtcacccgtctgcatccagctcagtgactcgctcattattttttctcttccagagtgattttctgttgagaaatcgatttcagttgcgcagtcaggccgtcgatacctttggtacgcagcagcgttccccactcgttttgtttggtggtgatcatactgacgccttcagcaatcatgtcgtaagcctgccaattgcccgtctgggagtttttacgccactggaagtccagacgcaccggcggacggccattcgggtcaataatggtaacgcgaataggcacaatggttttatcgcccagcggctgttctggcgcaatctgataggtttgaccgtgatacatcgccagcgcctgaccgtaagcctgcttcaggtactcacggaaagcggcaaagtaggcttcacgttgagcaggggtcgcactcttgtaatactggcccagcaccagcgcaccggcgtatttcacctgtacgtatggcagcagttcctgatcaacaatggtacgcagataatccgggttggcccgaatttgcggttgctcattcttcaggcgatcgaacgttttctgcgccgcctcgtccatcagcttatacggattggtctggtctgccgcggttgccgcactcagaggtgcaatcaccagcaaagcgaccatcattaaacgtttaaacatgcgtcggttctcctgaaattatttcgttgtacccacaggttcagtggtttcattattacctggcgcagcagctggcgcatcgccactattcttattgtcatcgcctttactaccgtaaaggaactgaccaatgagatcttccagcaccatcgcagacttagtgtcctgaattgtatcgccatccttcaggatagcagtccccagttccgggtcttcaaaaccgacgtttaatgccagatattgttcccccagcaggccggaagtacgaatgctcagcgaactggtatctggaatgtggttataacgttgttcaatttccagcgttacgcgcggcagataggttttcgggtccagcgtaatatccgccacccgacccacaacaacgccaccaatactgaccggagagcgcgctttcaggccgccaatgttatcgaacgtcgcataaagcgtgtaggtcggttcagtacgtatggacgtcacgttcgccgccttcaggcaaacaaacagcgccgccagcagtgctgctaataaaaagatacccacccaaatttcattttttttcgtttgcatgaactcaattcccaaacatcaatgcggtcagcacaaaatccagccccagaacagccagagacgagtggacaacggtgcgagtggttgcccggctaatcccggcagacgtcgggatggcgtcgtagccgttaaacaacgaaatccacgtcaccgtgatggcgaacaccacgctcttaatcagacagttgaccagatccatacgccagtcgacggcattttgcattgccgaccagaagaacccgctatcaatgcctttccaactgacgccgaccagagatccgccccagatccccacggcgacgaaaataaccgtcaacagtggtaatgaaataaccccagcccagaaacggggagaaataacccgacgcagcggatccaccgccatcatctccatactggagagttgctctgtagcgcgcatcaggccgatttctgcggttagcgccgaaccagcacgcccggcaaacaacaacgcggcaaccaccggccccagttcacgcagtagcgataacgccaccagcatacccagactggtttccgcactataagtggtcagaaccagataaccttgcagccccaacaccattccgatgaacacgccagaaaccacaataatcagcatcgacaggacgccgacattatagagctggcgcaccagcagcggcgcatgtttgcgaaattccggtttgccgaccagcgcattgaataacattaacccggcccgcccgaacgttctcagggttttaatccctttatgtccgagcgacgccagcgcatttaacagcatgagtggcttaactccctggtaaaagatcagcgtgataatcgccggcaggatagcggaacggaacaggcccgtcagctatcccgtccagaaactgacgtacgcgcggatcaggattcgcctgcaacgcctgggcactgccatgagcgacaatttttttgtccgccaggatccaggcgtgatccgcaatacttaacacttccggcacatcgtgagaaaccaccacacaagtcacgcccagcgcgctgttcagctcagaaatcagcttcaccagtacgcccatggtgatgggatcttgcccaacaaaaggttcatcaaacatgatgagatccggctccagcgcaatcgcacgcgccagcgctgcacgccgcgccatcccaccggaaagttcagaaggcattagtttagccgctccacgcagccccacggcctccagcttcatcatcaccgtactatgcaacaatggcgcgggaagttgggtatgttcgcgcagtggataggcgacgttgtcaaatacgttcatatcagtgaacaacgccccggactgaaataacatgctcatccgtttgcgcactgtatacaggcgcgaacgagacatcgccggaatattctcaccatcgaaaaggatctcaccatgatctggtgcgatttgcccgccaatcagacggagtagcgtcgttttaccgatgcccgatggccccatgatcgccgtgatcttccctcgcggcacggtcagggaaatattatcgaagatgcagcgattgccacgcgtaaaactgacatcgcgcatatcgactaaattcgccacagactgctccataattcacccttcgtcttgcgttgattttctaagcatggcgctcaatttaaccttgaacccaacatatttacagaatattacccgccgtggttagcgaaagctggcatttgttttactttttagccgcataaagtcaaaattaagcatccgttacggctttctgaaaatcttcagcggaccggcgagtatacctgaagaaaggacgttagatgcttttagctacggcactgttaattgttggtttacttttggtcgtttacagtgccgaccgcctggtttttgccgcgtctattctttgccgaacctttggcatcccgccgctgatcatcggcatgacggtggtcagtattggtacatcgttaccagaagtcatcgtctcgcttgccgcgtctctgcacgaacaacgcgatttagccgttggtacagccctcggctcaaacattatcaatatattgctgatcctcggtctggctgcgctggttcgtccttttaccgtccattctgatgttctacgccgtgaattacccttaatgttgttggtcagcgtggtggccggttccgtactctatgacggacaacttagtcgcagcgatggtatctttctcctctttctggctgtgctatggctgctgttcattgttaaacttgcacgtcaggctgaacgtcaggggactgacagcctgaccagagagcagcttgcagagctgccgcgtgacggcggattgcccgtcgcgtttttatggctcggcattgcgcttatcatcatgccagtggccacgcggatggtggttgataacgccacggtgctggcgaattactttgccatcagcgagttgacgatgggtctgacggcaattgctatcggaaccagcctgccggaactggcaaccgcaatagcgggggttcgcaaaggtgaaaacgacattgctgtcggaaatatcattggcgcaaacatttttaatattgtcatcgtgttgggtttacccgcgctgataacgccaggagagattgatccactggcgtacagtcgtgactacagcgtgatgttgctggtgagcattatttttgcgttgctgtgctggcggcgctccccgcaaccgggccgtggtgtaggggtattattaactggcggatttatcgtatggctggcgatgttgtactggttatcgccaatactcgttgaataactggaaacgcattatgtcgcacgtagagttacaaccgggttttgactttcagcaagcaggtaaagaagtcctggcgattgaacgtgaatgcctggcggagcttgatcaatacatcaatcagaatttcacgcttgcctgtgaaaagatgttctggtgtaaagggaaagttgtcgtcatggggatgggaaaatcggggcatattgggcgaaaaatggcggcaacgtttgccagcaccggtacaccttcatttttcgtccatcctggtgaagccgcgcatggtgatttaggcatggttaccccacaggatgtggtgattgctatctctaactctggtgaatccagcgaaatcacggccttaattccagtgcttaagcgtcttcacgtaccgttaatctgcatcaccggtcgcccggagagcagcatggcgcgcgccgcagatgtgcatctgtgtgttaaagtagcgaaagaagcctgtccgttagggctggcaccgaccagcagcaccaccgccacgctggttatgggcgatgccctcgctgtcgcgctgttaaaagcacgcggctttactgctgaagattttgcgctctcacacccaggcggcgcactgggtcgtaaacttctgctgcgcgtaaacgatattatgcatacgggcgatgagatcccgcatgttaagaaaacggccagtctgcgtgacgcgttgctggaagttacccgcaaaaatcttggtatgactgtcatttgcgatgacaatatgatgattgaaggcatctttaccgacggtgatttacgccgtgtcttcgatatgggcgtggatgttcgtcagttaagtattgccgatgtgatgacgccggggggaatacgtgtgcgccctggcattctggccgttgaggcactgaacttaatgcagtcccgccatatcacctccgtgatggttgccgatggcgaccatttactcggtgtgttacatatgcatgatttactgcgtgcaggcgtagtgtaaagattcaaggataaacaacaatgagcaaagcaggtgcgtcgcttgcgacctgttacggccctgtcagcgccgacgttatagcaaaagcagagaacattcgtctgctgatcctcgatgtcgatggcgtactgtcagatggcctgatttatatgggcaataatggcgaagagctgaaagcgttcaatgttcgtgacggttatggcattcgttgtgcgctcacctctgatattgaagtcgctatcattaccgggcgaaaggctaaactggtagaagatcgttgtgccacattggggatcactcacttgtatcaggggcagtcaaacaaactgatcgcctttagcgatctgctggaaaaactggcgattgccccggaaaatgtggcttatgtcggcgatgatctcatcgactggccggtaatggaaaaagtgggtttaagcgtcgccgtggccgatgcgcatccactgttgatcccgcgcgccgattacgtgacgcgcattgctggcggtcgtggcgcagtgcgcgaagtttgcgacttattactcctggcgcagggcaaactggatgaagccaaagggcaatcgatatgagtaaagccagacgttgggttatcattgtgctatcactggcggttctggtgatgatcggcattaatatggccgaaaaagacgataccgcccaggtggtcgtcaacaacaatgatcccacctataaaagcgagcatacggacacgctcgtctataacccagaaggggcactaagctatcgattgattgctcaacacgttgaatattattccgatcaggccgtttcgtggtttacgcagccggtacttaccacgtttgataaggataaaatcccgacatggtccgtaaaagcagataaagccaagctgaccaatgaccggatgctctatttatatggacacgttgaagtcaacgcacttgtgccagactctcaacttcgcagaatcacgacggataacgcgcagatcaatctggtgacgcaggatgttacctctgaagacctcgtcacgttatacggaacaacatttaactccagcggtctgaaaatgcgcggcaacttacgcagcaagaacgccgagctgattgaaaaggttagaacatcctatgaaattcaaaacaaacaaactcagccttaatcttgtgcttgccagctcacttctggccgccagcattccggcatttgccgtaaccggagacactgatcagccgatccacattgaatcggaccagcaatctcttgatatgcaaggcaacgtggttacctttaccggtaatgtcatcgtcacccagggcaccatcaaaattaatgccgacaaagtggtcgttacccgtccgggcggcgaacaaggtaaagaagtgattgacggctacggtaaaccggcaacgttctaccagatgcaggacaacggtaaacccgttgaaggtcacgcttcccagatgcactacgaactggcaaaagattttgtcgttctgacgggtaatgcttatctgcagcaggtcgatagcaacattaagggcgataagatcacttacctggtgaaagagcagaaaatgcaggctttcagcgacaaaggcaagcgcgtaacaaccgttctggtgccgtcgcagctgcaggacaaaaacaacaaaggccagaccccggcacagaagaagggtaattaattcgttatggcaacattaactgcaaagaaccttgcaaaagcctataaaggccgtcgcgtggtagaagacgtcagcctgaccgtcaactccggggaaattgtcggtctgctggggccaaacggtgccggtaagaccaccactttctacatggttgtaggcattgtgccgcgcgatgcgggcaacatcattattgatgatgacgatatcagtctgctgcctctgcatgcacgcgcgcgccgcggtatcggctatctgccacaggaagcctccattttccgtcgcctcagcgtttacgataacctgatggcggtactgcaaattcgtgacgacttgtctgctgaacaacgtgaagaccgcgcgaacgagctgatggaagagtttcacattgagcacctgcgtgacagcatggggcagtcactctccgggggtgaacgtcgccgtgtagaaattgcccgcgcactggctgcgaatccgaaatttattctgctcgacgaaccgtttgccggggttgacccgatctcggttatcgacattaaacgcatcattgagcacctgcgcgacagcggcctgggcgtgctgatcactgaccacaacgtgcgtgaaacactggcggtttgtgaacgcgcttatatcgtcagtcaggggcatttgatcgcccacggcacgcctacagaaatcttacaagacgaacacgttaagcgtgtataccttggggaagacttcagactctgatagggtagaagtttgcgacgttttagcaggagagtacgattctgaacatgaagcaaggtttgcaactcaggcttagccaacaactggcgatgacgccacagctccaacaggcaattcgtctgttgcagttgtcgacgctggaacttcagcaggagctacagcaggcgctggagagtaatccgctgcttgagcaaatcgacactcatgaagaaatcgacacccgcgaaacgcaagacagtgaaacgctggacaccgccgacgcgctcgaacaaaaagagatgccggaagagctgccgctcgatgccagttgggacaccatttacaccgctggtacaccatccggcaccagcggtgactacattgacgacgagctgccggtctaccagggcgaaacgacgcagaccttgcaggattacctgatgtggcaggttgagctgacaccgttttccgacactgaccgcgctattgctacctctatcgtcgatgccgttgatgaaaccggttatctgactgtcccgctggaagatattctcgaaagtataggcgatgaagagatcgacatcgacgaagttgaagccgtccttaagcggatccaacggtttgatccggtcggtgtggcggcaaaagatctgcgtgactgtctgctgatccaactctcccaattcgataagaccacgccgtggctggaagaggccagactgatcattagcgatcatctcgatctgttagccaatcacgacttccgcactttaatgcgcgtcacgcgtctgaaagaagatgtgctgaaagaagccgtcaatctgatccagtcgctcgatccgcgccccgggcagtcgatccagactggcgaacctgagtatgtcattccagatgtgctggtgcgtaagcataacggtcactggacggtagaactcaacagtgacagcattccgcgtctgcaaatcaaccagcactacgcctcgatgtgcaataacgcgcgcaacgatggtgacagccagtttatccgcagcaatctgcaggatgccaaatggttgatcaagagtctggaaagccgtaacgatacgctactgcgcgtgagtcgctgtatcgttgaacagcagcaagccttctttgagcaaggtgaagaatatatgaaaccgatggtactggccgatatcgcccaggctgtcgaaatgcatgaatcgacgatatctcgcgtgaccacgcaaaaatacctgcatagtccacgaggcatttttgaactgaagtatttcttttccagtcacgtcaataccgagggcggcggcgaagcttcctccacggcgattcgtgcgctggtgaagaaattaatcgcggcggaaaacccagcgaaaccgttgagcgacagcaagttaacctctttgctgtcggaacaaggtatcatggtggcacgccgcactgttgcgaagtaccgagagtctttatccattccgccgtcaaaccagcgtaaacaactcgtttgacccaaccgataaggaagacactatgcagctcaacattaccggaaataacgtcgagatcaccgaggcactgcgcgaatttgttacagccaaatttgccaaacttgagcaatattttgaccgaatcaaccaggtctatgttgttctgaaagtggagaaagtcacccacacctcagatgcaacactgcatgtaaacggtggtgaaattcatgccagcgcggaaggtcaggacatgtacgctgccattgatggcttaattgataagctggcacgccagttgaccaaacataaagataaactgaaacaacactaattgtccgggcaattagcatgtgcatggcggtctgttgtgcggcacaacgggccatttgtacggttaatgctccgagcctgttccactgtttgagtgggcaggttcttaggtgaaattatgacaaataatgatacaactctacagcttagcagtgttcttaacagggaatgtacgcgaagccgcgtccactgtcagagcaaaaaacgcgccctggaaatcatcagcgagctggcggcgaaacaacttagcctgccgcctcaggtggtttttgaagctatcctgacgcgggaaaaaatgggcagtaccggtatcggcaatggtattgccattccgcatggcaaactggaagaagatactctgcgcgccgttggcgttttcgttcagctcgaaacgcctatagctttcgatgccatcgacaaccaaccggtggacttactttttgccctgctggtgccggcagaccaaactaaaacgcacctgcatactctgtcgctggtggcgaaacgtctggcggacaaaaccatctgccgccgtttacgcgcagcccagagcgatgaagagctgtatcaaatcattacggataccgaaggtactccggatgaagcgtagttattcggtaatgtctcttttagacgttgtgaggagaaacagtacatggtactgatgatcgtcagcggacgttcaggttcaggtaaatctgtcgccctgcgtgcgctggaagatatgggtttttactgcgtggataaccttcccgtagtgttgttacccgatctggctcgaaccctggccgatcgcgagatttctgccgccgtcagcattgatgttcgtaatatgccggagtcaccagaaatattcgaacaggcgatgagtaacctgcctgacgctttctcaccgcaactcctgttcctggatgccgaccgtaataccttaattcgtcgttacagtgacacgcgccgactgcatccgctttccagcaaaaacctgtcgctggaaagtgctatcgacaaagaaagcgatttgctggagcctctgcgttcgcgagcggatctgattgtcgatacctcagaaatgtccgttcacgagctggctgaaatgctgcgtacccgtctgctgggtaaacgtgaacgcgaactgaccatggtctttgagtctttcggcttcaaacacggtatccctatcgatgcagattacgtctttgacgtgcgcttcttgccgaacccgcactgggatccgaaactgcgtccaatgacaggtcttgataaacctgtcgccgcgttcctcgaccgccacacagaagtacacaattttatctaccagacgcgaagctatcttgagctatggttacctatgctggaaaccaacaaccgtagctacttgacggtcgccattggttgtaccggcgggaagcaccgttcggtgtatattgcagagcaactggcagactacttccgctcgcgcggtaaaaacgtccagtcacgccatcgtacgctggaaaaacgtaaaccatgaccgtcaagcaaactgttgaaatcacaaacaagctgggcatgcatgcccggcctgcaatgaagctgtttgaattaatgcagggttttgacgctgaagtgctcttacgtaatgacgaaggcaccgaggctgaagccaacagcgttattgcgctgctgatgttggattctgccaaaggacggcagattgaagttgaagcgaccggtccacaggaagaggaagcactggccgccgttatcgccctctttaattctggttttgatgaagattaatcttcatcactttgacatacaactcccttcaaactccccccgacaataagaaaatcacgtactgaaatcgttctcaatcaacgtcatttgtacattttgtgcgcttttcactttcagaagaaccttaagaaaaccttaagaggcattgtttaggttttgtttaagttaatcgaccatactggagatcgtcagaaaatatttccaggagatggcatgattcgcttatctgaacaaagtcccctgggcaccggaagacatcggaaatgttatgcgcatccggaagatgcccaacgctgtatcaagattgtctaccatcgtggcgatggtggcgataaagagatccgccgtgagttaaagtactacgcgcatcttggtcgccggttaaaagactggagtggaataccgcgctatcacggtaccgttgagacggattgcggaaccggttatgtctacgatgtgattgcagattttgacggcaagccttccattacgctgaccgaatttgctgaacaatgccgttacgaagaagacattgcacaactgcgccagctactgaaacagctgaagcgttatttgcaggataaccgtatcgtgacgatgtcgctgaagccgcagaatatcctctgtcaccgcatcagtgagtcagaggttatcccggtcgtctgcgacaacattggtgaaagcacattgattccactggcgacctggtcgaagtggtgttgtctgcgtaagcaagagcggttatggaaacgatttatcgcccaaccggcgctggctattgccctgcagaaagatctgcaacctcgtgagagcaaaacgctggccctcacttcgcgcgaagcttaatccagctggtgttgttgcataaacggctcaccgcctaactgatacatctgccgtaaaatccacgcctgacggctacgcacgtagcccgatggcgaggagactttgaaacgaagtggattaggtaatacagctgccagtaatgcagcttccgaccgggtaagtttgctcgcgggtttgtggaaataacgttgtgccgcagcttcgacgccaaacacaccgtcgccaaattcggcgatattcaggtaaaccgtcaggatacgctttttgctccagaccgtttctatccccagcgttaatccggcttccagcccttttcgaacccagctacgcccatcccataaaaagagatttttggctgtctgttgagaaatcgttgaagcaccgcgaatacggttttcattgcgctcgttgtgcgccagggctttctcaatggaagcgacatcaaagccccagtgctcaggaaatttctgatcttctgcggcaatcaccgccagtcccatccacggcgagatttgatccatactgacccagtcagaatgtgccacgtaacgaaaattgccatgcagccaggcgctgacctgtcgctcgaccattaccgctgagaagggaacaggcgcaacgctaaacaacgcgatgcccccgccccagaaaacggcgaggacaaccattaaccgcaaaagaaaacggcgaacgaaactaaacaccgttaagcggcttttactcattcagccagaaccagcacgcgggaaaccagcttatcaatgccgctcgccgcttctgcaatgttctgcgccagcatatatgctggggtggtgacaatcttattgtcttcatcaaccacgatatcatcgacaggacacggcacatgctccgcgcccatctcttccagcacttctgcggtatcgatatcagtaccgatggtcaaacgcagcgggaaatcgaaaattttcggcagcatcgccggggcaatacacataaaaccaagcggttttccggcctgatgcatcgcttgtgccagcgcctttaattcacggtcaacggtgcattcgctaccaagactggcaaaattgcttaaattcttcgccgcgccaaacccccccggcacaatcaacgcatccagttcagcggcatcggcctgggccagaggacggatttcaccgcgcgttattcgtgccgcttcaatcagcacattgcgcgtttccgtcatcgcttcgccagttaaatggttgataacatcaacctgctgcttatccggtgcaaagcagaccgcctgcgcaccgctgcgtgaaatagctaacaacgtcaacaccgcttcatgaatttcagaaccgtcatagacgccgcatccgctcagaattacgccaattttcttcattgtgatcatcctttcgcaattgactgaaacacattaatttttttaataaaaatggtacgcatcacacatttaactgattcatgtaacaaatcatttaagttttgctatcttaactgcgtgcggcctgaaaaacagtgctgtgcccttgtaactcatcataataatttacggcgcagccaagatttccctggtgttggcgcagtattcgcgcaccccggtctagccggggtcattttttagtggcttttgccacccacgctttcagcacttctacgtcgtgacgccactcttctttcatctcttcaatccattcaccgacgttatcttcccaggccggaaggtcaggagactgaatttgctgacccagctgttgcagatggcgtaaccccactgaccccgccgcacctttaattttatgtccttcctcaacaatgccttttttatcctgcgccgtcagattcgactccagcacgctgacatagcccggcatcatcttctcaaacaccgctaacccgtcggtgatcagcttcggtcctacaagttcgagatactgttccagcatgggaatatcgagcaatgcttctgatttactgttctcttctgtcgtcaccgtactctcctcatcatcctgggtatcccagaatttcttgatcatcgcggttagcgccggaacagaaagcggcttactcagcacatcatccattccagcattgaggtactcttgtttgtctttcagcacgttagcggttaaggccaccagcggcggtaaatcctcgcgcggataacgtttcgtcagttcacgagagatatccagcccggtcatatctggcaactgaatatccagcaacaccaggtcgtattcgcccggtttaaacatctccagcgccgccttgccggtcatggcgacatcaacgctgttacctaatttttccagcacagaacgcgcaacaatcacgttcagttcaatgtcttccaccagcagcacattcagcgccggtaaaggcatatcgtcttcatcaaacgcatcatcgacctcttctgctaccgacggtgcgtggatcgtcaacgtaaaggttgaacctttgccctgttcgctggtaaccgtaatatcgccgcccatatttttcgccagacgacgagaaacggccagaccaataccggtgccggtggcaggtttaccgccatgactgtctttcacctggtaatacatggcgaaaattttatccagctcatcctgcggaatgccgataccagagtcttccacttcaaaatgcagcatatcgccttcatcgtagcgcacgcgcacggtaacctggccttgctgggtgaatttgacggcgttactgatgaggttccacaggatctgccgtaaacgcgtcccgtcggtaatgacctgatgcggtaatggcagcgtcggctccaggttaaagcgcaatcctttttgttgcgcctgcaatgcggagagattttccagatcggcaaggaagctggtgaaatcaaccggttgattatcaagctggaccttgcgccgttccatcttatccatgtcgataatatcgttaaagatattccccagcgtgacggccgaaacatggatggtcttgagatatttttcctgctcggcggtgagttcggtatccagcagaatgcggctcagaccgacgataccgttcagcggtgtacgcaattcgtgactgatggtggagataaacgtcgttttgtcgcggctggcccgttcaagcgcatcctgataccgcttacgctcggtaatgtcgcgaccaaagcccatcaaaccgtgacgtttacccacgcggtcgtagtacggcactttacggatttcaaagcaggctttgcgcccgtccgggtaatccagccactgttcataggtcagtgacacattatgacggaacactttttcatcggtttcaatgacttttgcggcggcttccggtgagtaaacatcagcaggtttcaggtgaaccagttgtttttcgctttttccggtcagcagctccatcgcgcggttacagccggaaaactctttatcttcgttacgataaaaaaccaggtcgggtgaagcatcaaggaaggaacgtaagaatgaggattgctgctcgagctgaatttgtgtctcttcgcgctctttgatttcaattttcagttggccgaaggtttcctgcagttctgcttccgctttttcacgaacggcaatttcctgatttagctgggcaatattatcttttaactgaacgttgaggctcaaatcgcgctcgcgcatctcctccagtttttgcaccagccgtgacagacgttgtcgtgactcctccagttgctcgacgaccaccgatagaaagtagaccgcccacggcgtaatcagcaaaccaaagaagatagaacgaataacatcaatgctttcgacctgaccatgcagcaccatggttaccgccatttgtaccacaatggcaagaacgacgagggccagcgccagcaacattgagaagcgcaccagacctaacttcatcatcaggtcaacataatactgcgccagcagacgaatttgcttcattagggaattccttcacgacaacctgccccaataatacccaattctgacagttacgttataaattgtgtgagaaatgcggaattcccctcaacgacctactccgttggaggtagccacggacgtcccagcgccgatccctgtacgccatgttcattcagatagcgatccagctcgaccattcccgtccatcgattttcgcaccacagcggagcaagcagcgtcgggcgacgggcgctggcggaaatgcggtggtagatcacttccggtggcgtatggcgaatcatttctccggcagtgagcgtgtaatcctccagttcaataccgttcaaacgccccgcttcccaggctttcgccataatgctgcctttcacaatatgcagcggatgcagctttatgccgtccacgccggtttcaaccactcgctccagcgtttgcaaacattcagcctgcccttcgccaggcaggccgacaattaagtgggaacacaccttcagcccgcgctgacgtgccagctgggttgtacgctgataacaggcaaaatcatggccgcggttgatgcgatgcagtgttttgtcgtgggcggtttgtagccccagctccagccacacttcgtaaccctggtccttatattcgcaaagcagatccagcaccgcatccggcacgcagtccgggcgggtacccacacacaaaccgacaatattggcctggctcaccgcctgctgatacatagaacgcagcacctgaacttccgcaaaggtgctggtatacgcctgaaagtaggccagatagcgtttagcgcggttaactaaattcgcctggtgcgccagttgctcggcaatggaacgatgctgctgcgcttcatcggcaaacgaggcaacattacagaatgtgcagccaccacgcccgatggtaccgtcacggttagggcagctaaaaccgccgtgcagcgtcagcttatgcaccttttgcccataacgacgggtgagatcaccaccaaacatattgactaatttctgtaactgcataatctgatagaccgcgccttgaaaagaggccaaagcctgccatttttagctcaattcggcgatgacctggatcaatcgtcccggcctgcttttatcaactgcataatcaatcaaaattaccgaaatttcatgcataatcacataaatcacttttgcttatcttgtgtcagatttttttatctcctgatggattttaggcaaaaacagtagcatgaaacgtcattaccaattaaggcagtataaaatgctggttttgtcgtcagttcaaggcaggataagggttaacacacctttatgacagtcaggaattgactgtttctctaacgacttcccttttagccttaaagataaaatccattttaatttcagtcatttaataaagaattttgcgctaaagcacatttctgtaccaataagcttgccatttgacctgtatcagctttcccgataagttggaaatccgctggaagctttctggatgagcagcctgctcatcatatttatgcagtaattgagatcccctcttcaccgtattaaccgatgcgaaaaggacaacaagggggcgaatgcgaggcgcgcgtatgacacgcaaaccccgtcgccacgctctttctgtgcccgtgcgcagcggttcggaagtggggttcccgcagagcctgggggaggttcacgatatgttgtacgataaatcccttgagagggataactgtggtttcggcctgatcgcccacatagaaggcgaacctagccacaaggtagtgcgtactgcaatacacgcactggcccgcatgcagcaccgtggcgcgattctcgccgatggtaaaaccggcgacggttgcggcttgctgttacaaaaaccggatcgcttttttcgcatcgttgcgcaggagcgcggctggcgtttagcaaaaaactacgctgtcgggatgctcttcctgaataaagatcctgaactcgccgctgccgcacgccgcatcgttgaagaagaactgcaacgcgaaaccttgtcgattgtgggctggcgtgatgtccccactaacgaaggcgtgctgggtgaaatcgccctctcctctctgccacgcattgagcaaatttttgtgaacgccccggcaggctggcgtccacgcgatatggagcgccgtctgtttatcgcccgccgccgcattgaaaagcgtctcgaagccgacaaagacttctacgtctgtagcctgtcgaatctggtgaacatctataaaggtctgtgtatgccgacggatctgccgcgcttttatctggatcttgcggacctgcgtctggaatcggccatttgcctgttccaccagcgcttctccactaacaccgtaccgcgctggccgctggcgcaaccgttccgctatctggcgcataacggtgaaatcaacaccatcaccggtaaccgccaatgggcgcgtgcgcgtacttataaattccagacaccgcttatccctgacctgcacgacgccgcaccgttcgtcaacgaaaccggctctgactccagttcgatggataacatgctggaactgctgctggcaggcgggatggatatcatccgcgccatgcgtctattagtaccacccgcctggcagaacaacccggatatggacccggaactgcgtgccttctttgactttaactccatgcatatggagccgtgggatggcccggcgggcatcgtgatgtccgacggtcgttttgccgcctgtaacctcgaccgtaacggtctgcgtccggcgcgctacgtcatcaccaaagataagctcatcacctgcgcctctgaagtcggtatctgggattaccagcctgacgaagtggtcgaaaaaggccgcgtcgggccaggcgaactgatggttatcgacacccgcagtgggcgtattctgcactcggcagaaaccgatgacgatctgaaaagccgccatccatataaagagtggatggagaaaaacgtccgccgactggtaccgtttgaagatctgcccgatgaagaagtgggtagccgcgaactggacgacgacacgcttgccagctaccagaaacagtttaactacagcgcggaagagctggactccgtaattcgcgtactgggcgaaaacggtcaggaagcggtcggttcgatgggcgatgataccccattcgccgtgctctccagtcagccgcgcattatttacgactacttccgccagcagtttgcccaggtgactaacccgccaatcgacccgctgcgtgaagcgcatgttatgtcgctcgccaccagtatcggtcgtgaaatgaacgtcttttgcgaagcagagggccaggcgcaccgtttaagctttaaatcgccgattctgctctactccgatttcaaacagctcacgacgatgaaagaggagcactaccgcgcagatacgctggatatcacctttgacgtcactaaaaccacgctcgaagcgacagtcaaagagctgtgcgacaaagccgaaaaaatggtacgtagcggcaccgtgctgctggtgctctccgaccggaatatcgctaaagatcgcctgccggttccagccccgatggcggttggcgcgatccagacccgtctggtcgatcaaagcctgcgttgcgatgccaacatcatcgtcgaaaccgccagcgcccgcgatccgcaccacttcgccgtgttgctgggcttcggcgcgacggctatttatccataccttgcctatgaaacgctgggccgcctggtagacacccatgcgattgccaaagattatcgtaccgtgatgctcaactaccgtaacggcatcaacaaaggcttgtacaaaatcatgtccaaaatgggcatctccaccatcgcctcttaccgctgctcgaaactgtttgaagcggtcggtctacacgatgatgtagtgggcctgtgcttccagggggcggtcagccgcattggtggagcaagctttgaagacttccagcaggatctgctgaatctgtcgaaacgtgcctggctggcgcgtaagcccatcagccagggcggtctgctgaaatacgtccacggcggcgaataccacgcctacaacccggacgtggtgcgcacgctgcaacaagcggtacaaagcggcgagtacagcgactatcaggaatacgcgaagctggttaatgagcgtccggcaaccacgctgcgcgatctgctggcaattacgccgggtgaaaacgcggtcaacattgctgatgttgaaccggcaagcgaactgtttaaacgctttgataccgccgcgatgtctatcggcgcgttaagcccggaagcccacgaggcgctggcggaagcgatgaacagcatcggcggtaattcgaactccggtgaaggcggcgaagacccggcgcgctacggcaccaacaaagtgtcgcgcatcaagcaggtggcttccggtcgctttggggttactccggcgtatctggtcaatgccgacgtcattcagattaaagtcgcccagggcgcgaagccaggcgaaggcggtcagttgccgggtgataaagtcacgccttacatcgccaaactgcgctattcggtgcccggagtgacgctgatctccccgccgccgcaccacgatatctactctatcgaggacttagcgcagctcattttcgacctcaagcaggttaacccgaaagcgatgatctccgtgaagctggtttccgaaccgggagtaggcaccatcgcgactggcgtggcaaaagcttatgcggacttgatcaccatcgcaggctatgacggcggcaccggcgcaagtccgctttcatcggtgaaatacgcaggctgtccgtgggagctggggcttgttgaaacccagcaggcgctggttgctaacggcttgcgtcacaagatccgtttgcaggtcgatggcggcctgaaaacgggtgtcgatatcatcaaggcggcgattctcggcgcagaaagcttcggcttcggcactggcccgatggtggcgctcggctgtaaatatctacgtatttgccatctgaacaactgcgcaacgggtgtagcaactcaggatgacaaactgcgtaagaaccactatcacggcctgccattcaaggtgacgaattactttgagtttatcgcccgtgaaacccgcgagctgatggcacagcttggcgtaacacgtctggtggatctgattggtcgcaccgacctgctgaaagagctggacggtttcaccgccaaacagcagaagctggcgctgtcgaagctgctggagactgccgaaccgcatccaggtaaggcactctactgcaccgaaaacaacccgccgtttgataacggcctgctgaacgcgcagttgctgcaacaggcgaaaccgtttgtcgatgagcgccagagcaaaaccttctggttcgatattcgcaacaccgaccgttctgtcggcgcgtcgctttcaggctatatcgcccagacgcacggcgatcaggggctggcagccgatcctatcaaagcgtacttcaacggcaccgcaggccagagcttcggcgtgtggaacgcgggcggcgtggaactgtacctgaccggtgatgccaacgactatgtcggtaaaggcatggcgggcggcttaatcgccattcgtcctccggttggttccgccttccgcagccatgaagcaagcattatcggcaacacctgcctgtatggcgcgaccggtggtcgtctgtatgccgcaggccgcgcgggtgaacgtttcggcgtgcgtaactccggtgctatcaccgtggtagaaggcattggcgacaacggttgtgaatatatgacgggtggtatcgtctgcattctgggtaaaaccggcgttaacttcggtgcgggcatgaccggcggtttcgcttacgttctcgatgaaagcggcgatttccgcaaacgcgttaacccggaactggtcgaggtcttaagcgttgacgctctggcgatccatgaagagcatctgcgtggtcttatcaccgagcatgtgcagcataccggctctcagcgcggtgaagagattctggcgaactggtcaaccttcgccactaaatttgcgctggttaaaccgaagtccagtgatgtaaaagcactgctgggtcaccgtagtcgtagcgcagctgagttgcgcgtgcaggcgcagtaaggggtagcaacaatgagtcagaatgtttatcaatttatcgacctgcagcgcgttgatccgccaaagaaaccgctgaagatccgcaaaattgagtttgttgaaatttacgagccgttttccgaaggccaggccaaagcgcaggctgaccgctgcctgtcgtgcggcaacccatactgcgagtggaaatgcccggtacacaactacatcccgaactggctgaagctcgccaacgaggggcgtatttttgaagcggcggaactgtcgcaccagaccaacaccctgccggaagtttgcggacgagtctgcccgcaagaccgtctgtgcgaaggttcctgcactctgaacgatgagtttggcgcggtgaccatcggcaacattgagcgctatatcaacgataaagcgttcgagatgggctggcgtccggatatgtctggtgtgaaacagaccggtaaaaaagtggcgattatcggcgcaggcccggcaggtctggcgtgtgcggatgtcctgacgcgtaacggcgtaaaagccgttgtcttcgaccgtcatccagaaattggcgggctgctgaccttcggtattccggccttcaagctggaaaaagaggtaatgacgcgtcgccgtgaaatcttcaccggcatgggtattgaattcaaactcaataccgaagtgggccgcgacgtacagctggacgatctgctgagtgattacgatgccgtgttccttggcgtcgggacttatcagtcaatgcgcggcgggctggaaaacgaagacgccgatggcgtgtacgcagcgctgccgttcctcatcgccaacaccaaacagttaatgggctttggtgaaacccgcgacgaaccgttcgtcagcatggaaggcaaacgcgtggtggtccttggcggtggcgacactgcgatggactgcgtgcgtacgtccgtgcgccagggagcgaagcacgttacctgtgcctatcgtcgtgatgaagagaacatgccgggttcccgccgcgaagtgaaaaacgcgcgggaagaaggcgtagagttcaaattcaacgtccagccgctgggtattgaagtgaacggtaacggcaaagtcagcggcgtaaaaatggtgcgtaccgaaatgggcgaaccggacgccaaaggccgtcgccgcgcggagatcgttgcaggttccgaacatatcgttccggcagatgcggtgatcatggcgtttggtttccgtccacacaacatggaatggctggcaaaacacagcgtcgagctggattcacaaggccgcatcatcgccccggaaggcagcgacaacgccttccagaccagcaacccgaaaatctttgctggcggcgatatcgtccgtggttccgatctggtggtgaccgctattgccgaaggtcgtaaggcggcagacggtattatgaactggctggaagtttaagcgaggtaacaatgaattcgccagactgtgtctggcgaatcaaattactgacgaagtgcgcgttgttttctggcaaatgcggcatgagcgtttgacctttcctataatagggataattttcaataaattgtgctttgttcaccaagtctgatgagtgaagcacatcaagcaatttctcatttacaatccgtctcaattacttgttaacacctctgacaataccgattctgcaagctattcagtcttttcattccatgtaaattgtctcgatattaatatacaaaatatgaatataaaaaaccaatatattatccttaattatctatatattttcctatttttcagcgcaaacattcatgtaatgaataattatcaccacaaaccacctcaccagcaccttattattcacatgatcgtaactataaaattcattaaataaatacatcccagcaagttggctatttctgaacgagttatttatttacattcacaaacagatatatatactgcttcagctttttattttaaaaaataaatttgttattaaggatatgttcatatgtttttcaaaaagaacctcacaacagctgctatttgtgcagcactttctgttgcagcattcagtgccatggcaacagattcaactgatacagaattaactatcatcggcgagtatacccctggtgcatgtaccccagttgttacgggcggcggcattgttgactatgggaaacatcataacagtgcgctgaatccgaccggtaaaagtaataaactggttcaactgggccgcaaaaacagcacattaaatataacctgcacagcaccaacgctaattgctgtaacctccaaggataaccgtcagtcgaccattgtagcgttaaacgacacatcctatattgaaaaagcttatgatactctcgtagatatgaagggaacgaaaaacgcctttggtttaggttctgcgcctaatggacaaaaaattggcgctgcatccattggtattgacaggtctaatggtgggattcacgcggcggacgatacaggtgaaattcctgtcgacctgattcaaactgaccactggtcagcagcgacccccacatggaaagcctcatctaatggcgcattctgctcgctgacaagttgctcagcaatcgagcgcggttattctgttgcaaaaacaggggaactgacacctgttgctattacagcggtcaccttcccgttactgattgatgctgcggtaaatgacaatactattcttggttctgatgaaacgatcaaactggatggtaacgtcactatcagcgttcagtatttataagaacttgtaatacagtttttatttttacgcattaaccagttagctataactcggacagattatgccctatgacatggtctgtcttaatcaatctcatcgcaaacagtgcataacatatattaacaatatgtttctgcgttatttatcattattacaggagttttaatttaaatgctcagacacattacattcactgtatttataacaacatcaatgaataccttagccacagggatggttcctgaaacatcagtattgctggttgatgaaaagcgtggtgaagctagtattaatattaagaatacagatgatcatccttcattgctttacaccaccattgttgatttgcctgaaagcaataaatcaattcgtttaatcccgactcagcccgttattcgtgttgaagccggtcaagtacaacaggttcgatttttacttcaggcgactgttcctctgcaatcagaagagctgaaacgcgtaacgttcgaaggtattccaccaaaagatgacaagagcagcagagttactgtttcaattcgtcaggatctacctgtactgatccacccggcttccctgccggaagagcgagagacctggaaattcctggaatggcgtaaaaatggcgaccaaattgagattagcaaccccagtaattatgtcgttcgtatgaccttacaatttaaaacgctcccttcaggaaaaacgggggctataaataagacctattttctaccacacaccagtacaactactgcattaacaaacgctacggatacaaaagtcgagttttacccagccagccgatatggttatcgcggtaataaatatgtcactgacttaaaataactttgcctggagcgacaaggatgttaaaaaaaacgttactggcctacaccattggttttgccttttctcccccagccaatgcagatggtatagagattgccgctgttgattttgatcgggaaacattaaaatcactaggtgtagatcctaatatatcgcattatttttcccgttcagcccgttttttgccaggtgaatattcactgatagtatcagtaaatggcgaaaaaaaaggcaacattgctacgcgctttgatgaaaatggcgacatttgtcttgatcaggcatttctgcaacaagccggtttaaaaattccttctgaagaaaaaaatggctgttacgactatatattgtcctacccgggtaccacaatcacaccattacctaaccaggaagcgttagatattatcgtttcaccacaggcgatcattcccatagggttggatctcacaaacgcagcaactggtggaacagctgcgctgctaaactactctctgatgagcagccgtgcagaattttctaatgggagttcggactactcccaggctgcacttgaaggcgggattaatattaatgactggatgttacgcagccatcagttccttacacaaacaaatggcacattcagtaaccagaactcgtcaacctaccttcaacgtacctttacagatcttaaaacactcatgcgagcaggtgaagttaacctcaataatagcgtgttggaaggagccagtatttacggtatcgaaatcgcaccggacaacgcattgcaaaccagcggcagtggtgtgcaagttactggtatagccaacacctctcaggctcgtgtcgagattcgtcaacaaggagttttaattcattccattctggttcctgcgggcgcattcactatccctgatgtacctgttcgcaatggtaatagtgatcttaatgtcaccgttgtcgaaacagacggtagttcgcacaactatattgttccctccaccctgtttaatcagcatgtagaaagcttccagggttatcgcttcgcgatagggcgggtagacgatgactatgacgaatcaccttgggtaattagtgcatcgagcggatggaatctgacacgctggagtgcaatgaacggcggcgttatcgtagcagaaaattatcaggcggcatcaatccggtcgagtctggttcccctgcccgatttaacagtgagcagccaaattagtacatcgcaggatacgaaagactcactgcaaggacagaaatatcgtcttgacgcgaactacaatctcccattttcacttgggctaacaaccagcctcactcgatctgatcgccattatcgcgaactgtctgaagcgattgatgatgattataccgatccgactaaaagcacttatgcgcttggtttaaactggtctaactccattctgggtggtttcaacatcagtggctataaaacatatagttacgacggtgacaatgactcaagcaaccttaatattaactggaacaaagcgttcaaacacgccacggtttccgtcaactggcagcatcaacttagtgcttcagaaaataatgaagacgatggtgatctgttctacgtcaacatcagtattccatttggcagatcaaacaccgccacactgtatactcgccatgacgatcataaaacccactatggtactggtgtcatgggagtcgtctcagatgagatgtcctactatgtgaatgctgaacgagatcacgacgaacgtgaaacgagcttgaacggcagtatcagttccaatctccattacacccaagtcagccttgccgcaggagcaagcggcagtgatagccgtacttacaacggtacgatgtcaggtggtattgccgtacatgatcagggagtgaccttttcaccgtggactatcaatgacactttcgccatcgcaaaaatggataacaatattgcaggtgtcagaattacatctcaggcaggcccagtatggacagattttcggggtaatgccgtcattccatcaatccagccgtggcgaacatcaggagttgagatcgataccgccagcttgccaaaaaatgtcgatatcggtaacggcacaaaaatgatcaaacaaggccgtggtgcagtagggaaagtcggattcagtgcgataacacaacgccgtgcattactcaatatcacactttccgacggcaaaaaactgcccagaggcgttgcgattgaagatagtgaaggcaactatctgacaacatcagtggatgacggtgttgtattcctcaataacatcaaaccggacatggtgctagatataaaagatgagcagcaatcatgccgtattcaccttacattcccagaagatgcaccaaaagatgtgttctatgagacagcaacaggagagtgccaatgaaacggataataacaggatgcctgctgctgaacttcgccatggccgctcaggcagagtgtaatatctccagtagcatacaaaatatcgactatggcaaacgaagtgctgccatgcgccaagttgaccggggtaaaacaacacaattagcagacagaacaatcacgctggtaatgcaatgcgatcaggacgctcatattcgtgttcagttgaataccgctaatatttccaacaacggatttggatttggcccgaatggttcattaaatctgatcgccagcgatgcattttcaggtagtaacaatctcgacctggcgttagccagtggcaaaaatgacaatccgggcagcacaggaacagcatcaattagggaaggtgcgaataagcggggaaattcttctcggctgactcagtcatttcatttcttcatgtttgagccgattttttctcccgtaaatgccttgaatcagcctatttagaccgtttcttcgccatttaaggcgttatccccagtttttagtgagatctctcccactgacgtatcatttggtccgcccgaaacaggttggccagcgtgaataacatcgccagttggttatcgtttttcagcaaccccttgtatctggctttcacgaagccgaactgtcgcttgatgatgcgaaatgggtgctccaccctggcccggatgctggctttcatgtattcgatgttgatggccgttttgttcttgcgtggatgctgtttcaaggttcttaccttgccggggcgctcggcgatcagccagtccacatccacctcggccagctcctcgcgctgtggcgccccttggtagccggcatcggctgagacaaattgctcctctccatgcagcagattacccagctgattgaggtcatgctcgttggccgcggtggtgaccaggctgtgggtcaggccactcttggcatcgacaccaatgtgggccttcatgccaaagtgccactgattgcctttcttggtctgatgcatctccggatcgcgttgctgctctttgttcttggtcgagctgggtgcctcaatgatggtggcatcgaccaaggtgccttgagtcatcatgacgcctgcttcggccagccagcgattgatggtcttgaacaattggcgggccagttgatgctgctccagcaggtggcggaaattcatgatggtggtgcggtccggcaaggcgctatccagggataaccgggcaaacagacgcatggaggcgatttcgtacagagcatcttccatcgcgccatcgctcaggttgtaccaatgctgcatgcagtgaatgcgtagcatggtttccagcggataaggtcgccggccattaccagccttggggtaaaacggctcgatgacttccaccatgttttgccatggcagaatctgctccatgcgggacaagaaaatctcttttctggtctgacggcgcttactgctgaattcactgtcggcgaaggtaagttgatgactcatgatgaaccctgttctatggctccagatgacaaacatgatctcatatcagggacttgttcgcaccttccttagtacttcccccaataattggctggtgtttatgcaaaatggtcaagaagtggtaattgatagcggtaaaagcgttagcctcacactgacaatggctccagcttttaaggatgaaggggaactaaccgacatgacagatattacaggcaatctgacggtcctggtggaggcaaaatgaacaatgtaaaattactgattgccggaagtgccttttttgccatgtcagcgcaagccgctgatagagtatcaattgacgttaaggtgactctggaagctgcagcttgtactccaatactaagcaacggcggagttgttaacttcggtagtcattcagtcaatagactttcaacgcagcactacacacagattggaacacgtaatattaatatgactataacttgcgaatccgctaccggcattgcgattaccgctcgtgatacacgaatggatagtatgaccaccggaaaagatagtgggggtcagagtggtgtaaaatataccttaaatggcggaggttatattagccagacaacgcgcttattcggcttagggaaaacaaaagataataaaaatatcggtagttatgccgtgttaattgatagcaacaacattagtgccagcaatggtagccagacgttagctgtatcaatagcaggtgcagatgccgtcataacagggcaaaaaagagcatggcaaacgctcaccgcttatccgcttgcagtcgatcaaagctattattacacctttgtaaaaccaggtgaaacaaccccaactcctgtaacgaacgccattataccgcttcaggtgagcgcatctatcgcgaatgatttaggcggttcagaaaaaatcgaacttgatgggaaagctgtgataagcgtagtctacttgtgataacaatgccggacaggagtactatcaggcattcgttttatacgatcggttaatgtttcaggaaagctcttcgcatatcttggggaaagtaaatgtaatacgctgttcttaattgttcagtgctcaccccccagagtatagctcattccattattcaacttagctccatataaagggacagataatggaatcgctctcagaaggaaccacagcaggctaccagcaaatccacgacggtattattcatctggtcgatagcgcccggacggaaacggtacgtagcgttaacgcgttaatgaccacgacgtaccaggaaattggccgacgaattgtcgaatttgaacaaggtggcgaggccagggctgcgtatggtgcgcagctaatcaagcgactatcaaaggatttatgtctaaggtataagcgtgggttctctgcaaaaaacttacgccaaatgaggcttttttacctcttttttcaacatgttgaaattcaccagacaatgtctggcgaattaacaccattgggaattccgcagacaccgtctgcagaattcccatcggcaaagatttggcagacgctgtctgccaaatctttccccttgcccaggtccacctacgtccgtttactttccgttaaaaacgctgacgcccgcagcttttatgaaaaagagacgctccgctgtggctggtctgttcgccagctagagcggcaaattgcgacccagttttatgagcggacactactgtcacatgacaaatcagccatgctgcaacaacacgctcctgccgagacgcatattcttccgcaacaggcgatacgcgatccctttgtgctcgaatttctggaattgaaagatgaatattcagaatccgattttgaggaggcgctgatcaaccacctgatggatttcatgctggaacttggggatgattttgcctttgttggtcggcagcgaaggttacgcattgatgacaactggtttcgtgtcgatctgctgtttttccaccgccgtttacgctgcctgctaatcgtcgatctaaaagtgggcaaattcagctatagcgatgccggacagatgaatatgtatctcaactacgccaaagagcactggacgctaccggatgaaaatccgcccatcggtctggttctctgtgcagagaaaggagccggagaagcgcattatgctctggcaggtttgcctaacaccgttctggcaagcgaatataagatgcaactacctgatgagaaacgactcgcagatgaactcgttcgaacacaggcggtgctagaggaaggctatagacgccgttaatttcagcggtttcgaattctgcagacagtgtctgcagaatctttaaaacgaactaagttttaagccattaaatcagccttaaccttcaccacaacctttttaatctctccaggctcgccgacaacgcatcctggtttatgcggttcacctggcataaacacggcgaacattcccggttttaagatgatggcttgctcgttatcaatggtgctgcaaagctgataatcatcctcatggtggaactcttcacactgacgcgcagtgcctgccatgccaaacagaatccgttcctcaccgtttaataacagctggatatcaatgtattgctcgtgcaattccgcttttttctcgacgggcgattgagtgttaaacgtcatgacattcataaagatattgtcgccctgtaattcgtaacgacccggcgctttttcttgcggtctggcagctaatgccagcgttaacgcgtcctgtaacgcaggatgtaacccagcagacggtaatgactgtacttcacccatcatcataatttttctccctgggccaacagcgcagccccaagtaaacctgcatcatggcggtaatgcgccgccagtaaatcaacatgaaatgccgctggctcctgcgccagatacgtttccaccagcgccagatacccttctgccagaccaacgctgccaccgaccaccacgcactggcaatcagttgtggctttaatatcagcgatcagccttgcaagcgtacgtgcggagcggtgaatcagctgctgcgcctgctcgtcaccctgcccggcgcgcgtgaaaatagttttcgcatccgcgccagccaactccccctgcgctgccgctgcaatgccgcgaccagaagcaatcgcttccacgcaacctgtgcgtccacagccgcagactgggccgtgtggatcggcaagcgtatgcccgatatgccccgccagaccgccagggccggtaagcagtttgcagccgctcactacaccgccgccaacgccggtggaaacggtgataaagaccatatcggttatatcgccatccagcgcctgaaactccgcccatgctgcggcctgcgcgtcgttaatggcaatggtcggcaaattggtaagttgttccagcgttttgactaacggaaagtgtagcaatccaccaagattatgcggattaagcgccagcaagctgccgtcacggattatcccggtcgaagcgatggcaacccgctgcgcatgagcttgcaacggagagactaatgcggataaggcatcacgcaaggcttctggtgtctggctggctggcgtaggaagttcacgacgatcgcggatctgcccgtcagcgccaatcagcgcggcggcaagtttagtaccgccgatatcaatcgccagtgtggtcatagcaccgcctttttcatcgctgtgttgtaccactgacaaatgtgctcaagacgcgtgattgcagaaccgaccgtcaccgcccacgcgccgtggcgcatcgcatccgccgcctgagcaggcgtgttgtaacgcccttcggcaatcacccgacatccggcgtcgctcaacgttttcaccagcgccagatccggctcttctggcgtttcaggcgtggtatagccagaaagcgtagtgccaataatttcggctcccagcttttggcatgccaggccgtcttccggcgttgagcagtcggtcatcgccagtaaaccgtgatggtgaatacgtgccagcagcgtttcaacaggcaccggacgcgggcggtcggtgccgtcaatggcgataatgtccgcgcccgcctgcgccagcgcatcaacatcttcaatataggccgtgatgcgtaccggagaatcctccagatcgcgtttcacaattccaataatcggcacgctcaccaccgcacgcgtggcttgcagatttgccacaccttcaatgcgaatggcaaccgcgcccgcctgttctgccgctaatgccatggcggcgacgatttcgggtttatcgagcgggctgtccggaaccggctggcaggagacaatcaggccaccgttagcagcgattttttgatccagttgtgcaagtaacgacatacatcttcccttagcgaaaggcccggtacatagaccgggcaacaggattaacttttggttttgactaaatcgtttttggcgctgccaaacggcacggcaccgctgaatggtttaccgtcgatagcgtcatgagtacgcaacgcttccgggcgcaaccaacgctgaacgcgagaaggcatatccagcccaatcagcaggatcaccacgaacgtcagactgaacgagagcgatgccagcgcagtacccagatccagacgttgagcgatcaacgcgccgatgattggggccagtgcaccgcccaatgcgccaacgttgtaggtaaagcccaggcccgctgcacgctggtcggtatcgaaataaccgccaatcagttttggtaagatcccggcgatcccttgtccaagcatttgctggaagaacagtaacagaccgagcacccagacgtttgcgccgccaatcgcaaataccggaataatcagcagctgcgaggccagcaggctacaaacgtacgctttgcgggttcccagccagtcaccgaggaagccacctacgcagcatcccaccgccgcgccaaagccactaaagaacagcacattggctacagtatgcgggttataagccagatcggttttcagatacgttggcagcagcgcctgaatcggccatgagtagaggaaagcaaacaacacgaccaccatcagcattacgcccgttggccagcgtttgcctgcactctgcaccataaagctgataaagattgcggcgcataacagcccaagaacagcgacgatcgcggcattttgcaggttaccggcgaagcagaaccacagcgcagtagccgccgccagtgtcattacgatattggcaatgcgatgttcaccacggtagagaatatccaccattgtgcgtactggtgctttacctgcgtgtttctctttccagtcttccgcttccgggatgtttttacgcagccagagagcaaagatgattggcaaaatgccgataaagaacagcgcacgccagccccagaccggaaccaccaggctatagacctgagcggcaacgacggcccccacagagaagcctgaaatcaaaaaaccactggctttgttacgcagatgttttggccagctttcaatgacataggtggcgctggaaccgtattcacccgccatccccatgccgatgaccagacgagcgataaacatggtgatgtagcctggcgcaaagccgcaggccagcgtcccggccgagaagagaacgatgctggtgaccattgccagacgacgcccgtagcggtcacccatagcgccgagcatcaggccgccgaaccagcgagagataaaggctgcagagatcagacttgccgcctgcaccgtcgtcagcccgaattcaccttgtacttcggtgagtaccagggcgattaaaacgaaatcaaaaccgtcaagcagatatcccaaccaggcagcggaaaatgcgcgccattgtgcacggttgagatggcgataccacgggatattctgggttgtagtactcattgtgagtctcccgcggtgggcgatgcccacacgctttggtatgaaaattgtagggtacagatgcgtttatttcccctcacccggtaggggcgagcgaggggaaacaactcacccgcgctcttgcatcaactgctgggccagcgccttcagttctggcagatatttttcatctaccggtccaaacggtttgcggcacagcggcacagaaacgacatccatataatggaggacagttttcaggccgcggaatacgcccgttttgatcagtaaatcaatgactttattgcattcagtttgcagtttctgcgcggtctggatatcgccttctttcagcgccttaacgatcccctgatagcgccagcccatgatgttgtaggtactgccgataccaccatcagcgcccgccagcagaccagaggcgaagatttcgtcgtaaccgttatagagcacaagatcaggatgttcacgacggatctgctccatctgatagagatcgccagaggtctgtttcagcgcacctacgccaggcaatgtaacaagtgtgttgatctgatccagggtcagttttaccccactcagggctggaatgttgtacaccaccatcggcaaaccatccgccgaatcaataattgcccgatagtgatcgcagtgttcttcaaagctgaaaggatagtagaacggcgtgacggcggagacggcatcgaagccataacgtttagccgatgccgcaagttgttggctttcggcggtgctgacgcaaccgacgtgggcgatgagtttaatcttacctttcgcctcttcggcgacgatttccagtacctgttcacgctcggaaaggctttgtacaaaggcctcgccggtcgaaccacccacgtataaaccgtcgatgccctgctgaatattgaactgaaccaggcgacgcagactcgctttatccagtgcttgttgttggtcaaaaggagtcaggagtgcagccattacgccacgtaaattcgttgccataaatacctctgaagtgatgcttgtctgataaacgatatacctttatacctgttataccagatcaattaagcaacaccccatacagaaagcttataatgcgatctgcttcactaaagtggcattatttctttttgttggtggtctgaccgaaagcgtgccaggtagcagagacgctgttgagatgcgattgcaacgcacgatcggcttcgtcaggatcatgacggcggatcgcatcaacgatcgcaatatgctgttgataactaacgttgttatgttcgtgcagtgcctgatcggtaaccgttgggcgtgcggcaataagccagtcgagcagggcaacgtggatcgccatgaagattgggttaccggggatctccgccagcacgcggtggaaatcaacgtctgaacgaatgaatgccgcgttgttatccagcgactgactgttgatttccagtgcttttgccagcaaatcgatttgctcatcggtggcatgttcagccgcatagcgcaccagactggattcaaagaacagacgtaattgttcgaaatgggcaatcccaccgggatgagaaaggaaatctttcgccatgccggaaagctcaccgatgatagtgtccgcagaaggacgcgagacgcgagcgcgttcgccgttgtttatttgcaccagacctttgcgttttaacgctgccagcgcttcacgcaccgaaggacgcccgacgttaaagaacgccatcagttcgcgttcagacggtaattgttcaccttcgccaaattcacgacggcggatcatctgttccagctcttcttccaccatttcggagagttttttacgcgccagcgggcggctacgcaagttgcgaccaattgcaggtgaagaatcttcggtttgcgaatcaaatgcgttcataaggcccattctgtaaggtcagtgtgattaacatcatcagtgacatcctatcacaggattgaaagtaggggaaaatggcagggttttctctttgtgcctcatcattaccataattaacggaataattaactattgcgaaaaattaatgtaacgcagataaaaacatcccgtttgaattatttataagactattcacgagcattatgaatattatgaatgtgttcttacaaaataatcataagcgcatattttttaatgaaaaatcacctcacctacaattaaaaacacgacatccgcaccataaatagccttgcaaaaaatataacatcgttgttttcaatctgccgtttatgggattgaccgttttcttttgacacggagttcaacaatgttcggcataattatatctgtcatcgtattaattacgatgggctatttgatcctgaaaaactacaaacctcaggtggtgctggctgccgcaggtatcttcctgatgatgtgcggtgtctggttagggttcggtggtgtactcgatcccaccaaaagcagcggctacttgatcgtcgatatttataatgaaatcctgcgcatgctgtccaaccgcattgccggattggggctgtcgattatggcggtgggcggttatgcccgctacatggagcgcataggggccagtcgcgcgatggtgagcttgttaagccgcccgttaaaactcattcgctcgccgtatattattctgtcggcaacttacgtcatcggccaaatcatggcgcagtttattaccagcgcctccggtctgggtatgttgctgatggtcaccttatttccgacgctggtgagtctgggagtaagtcgtctctctgcggtggcagttatcgcaaccacgatgtccattgagtgggggattctggaaacgaactccatttttgctgcccaggtagcgggaatgaaaattgccacatacttcttccactaccagcttccggtcgcctcttgcgtcattatctcggtggcgatctcccactttttcgtgcaacgcgcttttgacaaaaaagataaaaatatcaatcacgaacaggcagagcaaaaagctctcgataatgtcccgccgctctattacgccattttacctgtgatgccgttaatcctgatgctcggctcgctgttcctcgcccacgtcgggctgatgcagtcagaactgcatctggtggtggtgatgttactgagtttgactgtgacgatgtttgttgagttcttccgcaagcataacttgcgcgaaacaatggacgatgtgcaggcgttttttgacggcatgggtacgcagtttgccaacgtggtaacgctggtggtcgcgggtgaaatatttgcgaaaggcttaacgacgattggcactgtcgatgcggttatcaggggggcggagcattctggtctgggcggtattggcgtgatgattattatggcgctggtcattgccatttgtgccattgtgatgggctctggcaatgcgccgtttatgtcatttgccagtcttattccgaatatcgcagccggactacatgtaccagcggttgtaatgattatgccgatgcattttgccacgacgctagcgcgcgcggtttcgccgattactgcggtggtggtcgttacgtcaggaattgcaggcgtttcgccttttgcggtggtgaagcggacagcgatccccatggcagtcggtttcgtggtgaatatgattgccacaatcacgctattttattaagtcattaaaaagacaaaacaggccgcctgggcctgttttgtattacttcacaacgcgtaatgccggtcgaccaccgcgtggtggctgcggaggttcatcgtcaggatgagtgtcatcatcgtgatctggcttgtcgccatcaataaccgacataacggtttcgttgtctgccgatgcctcttcatcattcatgatgctggtatcttcatcgtaggcagcttcaggctcaaacatcgtgcctgcgccattttcacgggcgtagatagccagcacggcagccagcggcacagaaacctgacgcggaatgccaccaaagcgcgcgttaaagcgcacctcatcattcgccagttccagattgccgacagcacgcggcgcaatgttgagtacgatttgcccgtcacgcgcatattccataggaacctgcacgccagggagcgtcacatccaccaccaggtgcggcgtgagctggttatccagcaaccactcatagaatgcacgcagcagatagggacgacgtggtgttagctgtgacaaatccatacagattaactccggcccagacgcatttcacgttctgcttcagttaaagaagcaaggaaagagtcacgctcaaagacgcgggtcatatagcctttcagctctttcgcacccgggccgctgaactcgatgcccagttgcggcagacgccacagcagcggagcaagatagcaatcgaccaggctgaactcatcgctcaggaagtacggcttctgaccgaagaccggcgcaatcgccagcagttcttcgcgcagttgcttacgtgcggcatctgcttcagaagctgaaccgttgatgatggtgttcatcagcgtgtaccagtctttttcgatgcgatgcatgtacagacggctttcaccgcgagctaccgggtaaacaggcatcagtggcggatgcgggaaacgctcatccagatattccataatgatgcgagattcccacagggtcagctcacgatccaccagggtcggaacgctctgattcgggttgaggtcaatcagatcctgaggcggattgtccttttccacgtgttcgatctcgaaacttacacctttctcagccagcacaatgcggacctgatggctatagatgtcagtaggaccggaaaacagcgtcattaccgaacgtttgttggcagcgacagccatgaaaacctccaggtatagtcagaatttttactgctaccagccaccaggtggccagtcagaagttgtgttacccaataaggaacgactctctttgttcgaaaatcaaacaaaaaatgagcaatacccgacatttgggcagaaaattggatgatagtttaccagattttgcgaccattgtggtgagtcgatgccggaaatggggaaaaagagatgcgctttagtctgaaatagttgacttagtcccttattggcgatgtggtttttgttttacctgtctgtcaggtggcagcaaaaagcaactttccagtttttacgctgattcagattttagctataaaaaaacccgccgaagcgggttttttcgaaaattgttttctgccggagcagaagccaattaacgtttggagaactgcggacgacgacgtgctttacgcagaccgactttcttacgttcaacctgacgagcgtcacgagtaacgaagccagctttacgcagttcagaacgcagggactcgtcgtattccatcagagcgcgggtgataccgtgacggatcgcaccagcctgaccagagataccaccacctttaacggtgatgtacaggtccagtttctcaaccatgtcgaccagttccagcggctgacgaactaccatgcgggcagtttcacgaccgaagtactgttccagagaacgttggttgattacgattttaccgttgcccggtttgatgaaaacgcgagctgcggaacttttgcggcgaccagtgccgtagtattgattttcagccattgcctataatcccgattagatgtcaagaacttgcggttgctgtgccgcgtggttgtgctcgttacccgcgtaaactttcagtttacggaacatagcacgacccagcgggccttttggcaacatgcctttaaccgcgatttcaatcacacgctcaggacggcgagcaatcatctcttcaaaggtcgcttgtttgataccaccgatgtggccggtgtggtgatagtacactttgtcagtacgcttgttgccggttacagcaactttgtcagcgttcagaacgatgatgtaatcaccggtatctacgtgcggagtgtattccgctttgtgcttaccgcgcaggcgacgagccagttcagtagccagacggcccagagttttaccggtcgcgtcaacaacataccagtcgcgttttacggtttctggtttagctgtaaaagttttcattaaaagcttacccaataaatagttacacgttggtgaacacccaaacgtcttcaattgttgaggttcacacgacaaagtccggcaaacctaccccttcgaatagcctatgccagcacacaaaaagttttgggaaaaaaactttcttgtaacgtggggtcgcaggattatagagaagtcggggtcaaagatcgacccctttttgtgatttgtgacaggttttaacccgccaaatgctcgcgcttcagatactcttcgctttgcatctcttgcagacgtgacaggcaacgctggaactcaaacttcagccgatcgccctgataaatttcatacagcggcacttctgcactcaccactaatttgacatggcgctcgtaaaactcatccaccagcgcaataaagcgccgcgcttcgctctccatcaaccgcgtcataactggtacatcaaacaacatgaccgtatgaaagagacgtgagagcgcaatatagtcatgctgactgcgggcgtcgacgcacagcgtagtaaaagagaccgccagcgtctggttctcgacgcccattgttgctaatggccgatggttgatttctaacgtcggtgaattttctcgtttcccccccgccagcgccaaccatagtttatccatttgcgcccgggtttcatcgtgaagtggcgaaagccacagatgcgcctgagtgagtgtacgcagacgataatcaacaccagcgtccacgttcattacatcacaatgctgtttaatggcatcgattgcaggcagaaaacgcgcacgttgcaggccatttcgataaagttcatccggcggaatatttgacgtcgctaccagggtaataccgcgagcgaacagggctttcatcagaccgccaagtagcatggcatcggtaatatcagaaacaaaaaattcgtcaaaacagagcacgtcagtttcggctttaaagcgatcggcaataatttccagcggatcggtctgcccctgtaaggcagttagctcttcatgcacccgcagcataaaacggtgaaagtgcaggcgctgtttccgctctcccggcaggctttgatagaaaaggtccatcagccaggttttcccgcgtcctacaccgccccacatatataagccacgcactggcgtatgctttgtgtcttcgcgtttaccccacagcttaccgacccgcgccattagcccactcgtcctgggggctggtggcgtgctattgatgagttcctgataaataatttccaggcggctgacggcctctttttgaacgtcgtcgggttgatggctgccttcattaagcgccttcaggtattgcgatgttggggtaacgctttgcatgatcttattgttattccttgaataatcggtgcgccgttgttcacggttgacgaaaaaaaggccgttctacactacgcgatatgcagtcgggattccacttctgtggaattaacggttatagtggcataatcagccgcaggcatggagcctgaagccaacaccctacggaaacaaaagacaacgggagatgttcatgacctgggaatatgcgctaattgggttagtcgtcggcatcattattggtgctgtggccatgcgttttggtaatcgtaaactacgccagcaacaggcgttgcagtacgaactggaaaagaataaagctgaactggacgagtatcgcgaagagctggttagccactttgcccgcagcgcggaattactggataccatggcgcacgactatcgccagctgtatcagcacatggcaaaaagctccagcagcctgctgccggaactgtctgctgaagcaaacccgttccgtaatcgtctggcagagtctgaagccagcaacgatcaggcaccggtgcagatgcctcgcgactattctgaaggcgcatccggcctgctgcgtactggcgcgaagcgcgactaatttatttttcgggcgcagccattgcgccctcctcttctctccctccccgactatcatttaatctggtgtctcattgttagccgtctgaaaattcaataacatcaaactgttttgaatctcttttcttatcattcaggtacgagagcaggaataatgaaaaaacaaacccagctgttgagtgcattagcgttaagtgtcgggttaactctctcggcgtcatttcaggccgtcgcgtcgattccaggccaggttgccgatcaggcccctctccccagtctggctccaatgctggaaaaagtgcttccggcagtggtgagcgtacgggtggaaggaacggccagtcagggacagaaaatcccggaagaattcaaaaagttttttggtgatgatttaccggatcaacctgcacaacccttcgaaggtttaggctccggtgtcatcatcaacgccagtaaaggctatgtgctgaccaacaaccatgtgattaatcaggcacagaaaatcagtattcagctcaatgatgggcgcgagtttgatgcaaaactgattggtagcgatgaccagagcgatatcgccctgttacaaattcaaaacccgagcaaattaacgcaaatcgctattgccgactccgataaattgcgcgtcggtgattttgccgtagcggtcggtaacccatttggccttgggcaaaccgccacctctggcattgtttccgcattaggccgcagcgggttgaatcttgaaggtctggaaaactttatccagacagatgcttccattaaccgcggtaactccggcggtgcactattaaaccttaacggtgagttaattggcatcaacactgcaatccttgcgcctggcggcgggagcgtcgggattggatttgccatccccagtaatatggcgcgaacactggcgcagcagcttatcgactttggtgaaatcaaacgcggtttgttaggcatcaaaggcaccgagatgagtgccgatatcgccaaagccttcaaccttgacgtgcagcgtggcgcgtttgtcagcgaagtgttgccaggttctggctcggcaaaagcgggcgtcaaagcgggcgatattattaccagcctcaacggcaaaccgctgaatagctttgctgagttgcgctctcgtatcgcgaccaccgagccgggcacgaaagtgaagcttggcctgctgcgtaacggcaaaccactggaagtagaagtgacgctcgataccagcacctcttcgtcggccagcgctgaaatgatcacgccagcgctggaaggtgcaacgttgagcgatggtcagctaaaagatggcggcaaaggtattaaaatcgatgaagttgtcaaaggaagcccagctgctcaggctggcttgcaaaaagacgatgtgatcattggcgtcaaccgcgatcgggtgaactcgattgctgaaatgcgtaaagtgctggcggcaaaaccggccatcatcgccctgcaaattgtacgcggcaatgaaagcatctatctgctgatgcgttaatgtcgtaaaccgggcatcaggcttacgtgtgatgtccggttaactcgtggtatgctgctgccgttcccttttttaatgacgcctccatcatgtttgtgaagctcttacgttccgttgcgattggattaattgtcggcgctattctgctggttgccatgccttcgctgcgcagccttaacccgctttccactccgcaatttgacagtaccgatgagacgcctgccagctataatctggcggttcgccgcgccgcgccagcggtggttaacgtttacaaccgtggtttgaacaccaactctcacaaccagcttgagatccgcaccctgggatccggtgtaatcatggatcaacgcggttatatcatcaccaataaacacgtcatcaacgacgccgatcagatcatcgtcgccttacaggatggacgtgtatttgaagcattgctggtgggatctgactctctaaccgatctggcggtacttaaaattaatgccactggcggtttacctaccattccaattaatgcacgtcgcgtaccgcacattggcgacgtagtactggcgatcggtaacccgtacaacctcgggcagaccattacccaggggattattagtgccacgggtcgaatcggtctgaacccgaccgggcggcaaaacttcctccaaaccgatgcttccattaaccacggtaactctggcggcgcgctggtgaactcgctgggcgaactgatgggcattaatacgctgtcgtttgataagagtaacgatggcgaaacgccggaaggtatcggctttgcgattcctttccagttagcaaccaaaattatggataagctgatccgcgatggtcgcgtgatccgcggctacattggtatcggcggacgtgagatcgcaccactgcacgcgcagggcggtggtatagatcaactgcaagggatcgtggttaatgaagtgtcacctgacggcccggcggcgaatgcgggtattcaggtcaacgatctgattatttcggtggataacaaaccggccatctctgctctggagacgatggatcaggtggcggaaattcgccctggttcggtgatccctgtagtagtgatgcgtgatgataagcagttaacgctgcaggtcaccattcaggaatatccggcaaccaattaagtcgtgcgctcaaaacaaaaaaccggagtctgtgctccggttttttattatccgctaatcaattacttattaacgaactcttcgcccagggcgatatctttcttcagcgtatccagcataccttccagcgcgttctgttcaaatgcgctcagggtaccgatagatttacgctcttccacgccgtttttacccagcagcagcggttgagagaagaaacgggcgtactgaccgtcgccttcaacgtaggcacattcgacaacgccttgttcgccctgcagtgcacgaaccagagacagaccaaaacgtgcagctgcctggcccatagacagggttgcagacccgccaccggccttcgcttcaaccacttcagtacccgcgttctggatgcgtttggtcagatcagccacttcctgctcggtaaaactaacgccaggaacctgtgacagcagcggcagaatggtaacaccagagtgaccgccaataaccggcacttcaacttcgcctggctgtttgcctttcagttccgcaacaaaggtgttggaacgaatgatatccagcgtggtaacgccgaacagtttgtttttgtcataaacaccggcttttttcagcacttcagcagcaattgcaactgtggtgttaaccgggttagtgataataccaatgcacgctttcgggcaggttttcgcaacttgctgtaccaggtttttcacgatgccggcgttaacgttaaacaggtcggaacgatccatacccggtttacgcgctacgcctgcagagataagaacgacatctgcgccttccagcgccggagtcgcatcttcaccagaaaaacctttgattttcacagcagtagggatatggctcagatcgacagccacaccgggagtcactggagcgatatcatacagagagagttctgaacctgaaggcagttgggtttttaacagtagtgcaagcgcctggccaataccgccagcagcgccgaggactgcgactttcatcctaaactccttattatattgataaactaagatatgttgctccgctgccgcgaccttaatccacaaaattgccgtttacaatgaccacatctcaagaatgtgtagtcacgcaagtttagcgtttatgcatttaattgccgtaatcaggaacctaacttacgtaattaacagtcgcttatgcattagcgcaacattccaacaggtggtgacaatataccctaccgttcagccaaaacaacatcaatttgataacaattaatttacttttaagcagaatttgcatgccgtgacgcaggcatgtttctcaataacgaaatttgataaaatcccgctctttcataacattatttcagccttcttcagggctgactgtttgcataaaaattcatctgtatgcacaataatgttgtatcaaccaccatatcgggtgacttatgcgaagctcggctaagcaagaagaactagttaaagcatttaaagcattacttaaagaagagaaatttagctcccagggcgaaatcgtcgccgcgttgcaggagcaaggctttgacaatattaatcagtctaaagtctcgcggatgttgaccaagtttggtgctgtacgtacacgcaatgccaaaatggaaatggtttactgcctgccagctgaactgggtgtaccaaccacctccagtccattgaagaatctggtgctggatatcgactacaacgatgcagttgtcgtgattcataccagccctggcgcggcgcagttaattgctcgcctgctggactcactgggcaaagcagaaggtattctgggcaccatcgctggcgatgacaccatctttaccacccctgctaacggtttcacagtcaaagacctgtacgaagcgattttagagctgttcgaccaggagctttaatctctgccccgtcgtttctgacggcggggaaaatgttgcttatccctctcaaccccctgctttcccctgcgattaatttaacgaatagtgcgttttactgcgacatgtcattcacacaatgaatacataaggtaaaaaaagcacattatgcaaaattcattatctaattgaaaaaactagaattaacgataaataaccgtatttttaattcttttttgttattaaaattcacatttttaacacttagtatcaactgaaacagttagcgcggtattaattagctcaataattagtgtatacttgattttgtgatatgggtcacgaaacaaaggcccagctaaaagattatgtcgaggtaaaaatcatgaaaatcaaaaccactgttgctgcattaagcgtactttctgttctctctttcggtgcattcgctgccgactccattgatgctgcacaagcacaaaatcgtgaagcaatcgggaccgtatccgtaagtggtgtggcgtcttcgccaatggatatgcgtgaaatgctgaacaaaaaagcggaagagaaaggcgcaacggcctaccagattactgaagctcgtagcggtgacacctggcacgctacggctgaactgtacaaataaaccctcatcgtcttgtccgacgatattgcccccggttcgggggcttttttttgcgctaatgacgaacattaaaacgcaaatgcccttccagctcttcctctgcctcatcaaacagcaatattaacgcgccaaaacggcgacgcgttttctctcccagatgaacaaattcaatctcaagtggtagcggcaggacatcgttcattaacacatcccatagtgagtcgagatcgcgtaccttatctttcgccagaccaaaggtttggctaaagtcacgataaaaatcctcctgactctcaatctcatcaaaatcaaaggtataaatattcatctgttgccaccgtcacgtttcgcggcgagttctgccgtgcatcgctaagtatagccatgaaaaaaccgacgcttttggcgtcggttttgacttaactatcggtcaacgcatgttgatacttatggagcatccccgccagccgatttaccggttccgtcacctgcggtggcgcttgccagatgcgtagcttttcctggtagatttccagttcttccagcaactggccaaagtaccgacgacgtttatcatcgctacgggcagatatcacatggtctgctgtgcggcgcatttgtcggtgaaacgccgataaatcctcgttaaccgggatcggtgcatcacgcaggcgctggtgcgcgataatcatcgtcagcgccaggcgaaatttcggcaaatcccctgggaacttattcatcagcaaaaacagctgctgataaagtgccgggaggtggttctctttacgacgtgccacattggtagtcatcgcggaaacagcggcagaaacaaactgattaagcagtacacgtccggtcctgtcgcgcgatttatcccgcaccagcaaaataacggtgaacgcgagcacacagccgacgatttgccctaatgcgctgtcgagaaactgactgaaatggaaagtcatcgggttatccagcacgataatatttatggtgctggccagtgcccccatcgagcccagtcgccgtttctgtacttctataccgaggaagaatcccagcactgccaggctaatgcacagcagcaacatgctctgttgggtattagggataatcaccaaaaagtagagcagccctaacggcagcgcggccagcgtcccgtagataaagtcgatcgccaccatgcgtggattcggcaaacgcattgccagtgacgtcactaccgcaatcatcaccattgcaccactgccggaagtccagcccgtccacagccagaaaagcgtgcccagaatgcaggaaagtgtggttcgccagaagttaaccattgcatgatgacgttcggctgactctacttttacttccggttcgccttgcaggatctcttcttcggtggcgttgatttttgtgttactgataacgccgcgcttgagaagctgataacgcgttgccgccgcgacccagctataaatggtgacaggcgtttcccgttccccggtccaggcgataactctccgcaggcgtttgagctgcttgtggacgtcctgcgcggtttctaccggcgtgtcaaaaaattcgcggaaagtatcagtgatcaattccgggcgcgtattctgaataagataagtttcgcaggattgggtaatcagcgtcagcgatagcgtattgatcgcttttaaacgtcgattggcccgcgcccagcgggaagattccatattcaggttgctgcgcatgccttgtagcgccgtggtgcgtcgcaccaggtcgccccaggctttatcgacaacttcaccatcgccatgcttgatacagagttgcattaattgatattgcgcgaccagcaaactttccagctctcgatccacttcttgtttgatcgatcgcggagaaaagagcaaatccgccataatcgcacacacaataccgataacgatctcgctacaacgttcgacggcaaactgcggcgtaagcaatggttccggctgaatggtgatcacaatgatcagcgcggtataaccggccagcccccacgcatacgagttttctattcgtaccagcgaggatatccaggtacaaaaaccggcccagatacagcacaccagaatcatcaataatggtgcgcggatcatcgcaatgatgatcaccagtccggcaatacagccaataaatgtgccgatgatgcgcaaaaagccacgatagcgaatagcgccagaatacggttcacctcccgcagcaaaggccggaccggcggcaacaatcgccgctgtcagtaccgcccagcgtggcgtttccagctggaagtgaaagccaacaaacagcgccagtacaatggcggtcgccagttttaccgcaaagcgaatatgttggttagcaatggagaaaatacccatcgtgattaaccaaactcacgcaggcgatgggccattttacggaagaacgaatcctggctttcgtcgcgatcttgtttgccagtgaccaccactgtagcagtggtgcccgcaggccagatgttctcttgctggttgtcgagacgaatacgaaccggaacacgttgcgcaagacgcacccattcaaggttagagtctatagtcgccatccctttgtcgtcacgcgtgctgctggcgttggtgacccctgcggcaacactatcaacagtccctttcagcactttgttactgccaagcggcgtgatctctgcacgataccccggacgcaccccttccagcttagtttcttccatataggccagtacatagaaggagttctgtttcaccagcgcaaccgccgttgatcctcgagtaataaactcaccggtatagacgttgaggttggtcacccagccatctgctggcgcgcggatcaccgtgcgttcaagatccagttttgccagatcgcgggtcgcctgcgctttcgctaactgatgcagaaccgtttgtagtacgttgttggcctggtcgatctcttcgcgagacatcgcctgcacaccgagacggttacgacgtccggcctcctggcgtttctcctgtgccagtacctgataataagcaacatcggcttgcgcttcctcaagcgccttttgatagcgcggctggtcgatggtgaacagtatctgtccttttttcaccagctggttatcatgaacattcacctgggtaatgagtccagaaacgtccggcgcgatcgcaacgacgtcagcgctaaagcgcgcgtcacgcgtccagggggattcggtgtaatagacccaggcattaaaaattgcgatgaaggccagaatgactaatacgaccgtgatggccgtacgggagaattttcttattagtgttttcacttcaacctcaaacgaacagtcgcgatatcaaataaaacaagcagcaatagagcgcggtgttgaacaacgccggatgccagacaaagtcgtagatacctgttggcacaagtacccggcgcaccagccagaaaatcgccagtgataaaagcaattcaaaaaatatcggtgggaaggacagcccaaacaccacgataacgggaaacagactcatgttgaccttggttgtaaagagagagcaggcgttattattttcagcatctgtcgccgcagagaagggcatggaaagccgggcgagagcaacattgctgtagattgatatttaatatattagcgtaactgttatgctgttatctatattatgtgatctaaatcacttttaagtcagagtgaataatggaacgactaaaacgcatgtcggtgtttgccaaagtagttgaatttggctcttttaccgccgccgccagacagctacagatgagcgtttcgtccatcagtcagacggtatcaaaactggaagatgagttgcaggtaaagctgttaaaccgtagcacacgcagcattggcctgaccgaagccggtagaatttactaccagggctgccgtcgtatgcttcatgaagtgcaggatgttcatgagcaactgtatgccttcaataacacccccatcgggacgctacgcattggctgttcttcaactatggcacaaaatgttctcgccgggctgacagccaaaatgctgaaagaatacccaggtttgagcgtcaatctggttaccggaattccagcccccgacctgattgccgacggtctggatgtggtgatccgcgtcggcgcgttgcaggattccagcctgttttcccgccgtctgggcgcgatgccaatggtggtgtgcgccgcgaaaagctatctcacacaatacggcataccggaaaaacccgccgatttgagtagtcattcatggcttgaatacagcgtgcggcccgacaatgaatttgaactgatcgcaccggaagggatctcgactcgcctgatcccacaaggaagatttgtgactaatgatccgatgacgctggtgcgctggctgacggcgggtgccgggatcgcctacgtgccgctgatgtgggtgatcaacgagatcaatcgtggggagctggagatcctgctgccgcgttaccagtcagatccacgcccggtttatgcgttatataccgaaaaagataagctgccgctgaaggtacaggtcgtgatcaactcgctgacggattattttgttgaggtcggtaaattgtttcaggagatgcacgggcgcgggaaagagaagtaattcatattgtactgttacgttgtacaaacctgtgccaacgggttcccctcaccctaaccctcaccccaaaggggcgaggggaccgttcgtgcacgtagaaagattaattatccttctgaaaatagtgaaattattacgcagtaccgccaacagtcaggttatcgactttcaacgttggctggcccacgccaaccggcaaactttgcccttctttaccgcagacacccacgccgttatccagtttcaggtcgttgccaaccatcgaaatctgctgcatggtttcgataccggaaccaatcaacgttgcgcctttcaccggcttcgttactttaccgttttcaatcagatatgcttctgaagtggagaaaacgaatttgccggaggtgatatccacctgaccgccaccaaagttcggtgcatagataccgtactcaacggattcaataatttcctgcggggtcgatttacccggcagcatataggtgttggtcatacgcggcatgggcagatgggcgtaggattcacggcgaccgttgccagtcggcgtcatccccatcaaacgcgcgttgagtttatcctgcatgtagcctttcagaatgccgttctcaatcagcacgttgtactggcctggcgtaccttcgtcatcaatcgccaccgaacctcggcgatcgaccatcgtgccatcatcaaccacggtacacagttctgaagccaccagctccccgacctgtccactaaatactgaagtgccacggcggttgaagtcgccttccagaccgtgaccaaccgcttcatgcaacagcacgcccggccaacctgcgccaagtactaccggcatggtgcccgctggtgcagcaacggcagaaagattgaccagcgccatacgcactgcttcttttgcccatgcatccgcacggacttcgccgtcgagatcggcaaggaagaattcataaccaaaacgaccgccgccgccactggcaccgcgttcgcgtttgccatcttcttcgacgagaacgctcacggaaagacgcaccagcggacggacatccgccgctagcgtgccgtcggtggccgcaaccaaaattaattcatagacaccactgaggctggcagtcacttcctgtacgcgcttgtccgcttcgcgggcaaccttatcgacgcgacgcaggatatccagcttctcttcacggctcatgctttgcagcggatctaccgaggtatacaacgggctatgctctaccgcgcccagcgtctgtactttaccatcaccactatcacggacgatggtgcgcgccgcttgcgcactctgttccagcgccagcaggctgatttggtcagcgtaagcaaatccggttttttcaccgctgattgcacgcacaccaacgccctgatcgatgttgtaagaaccatctttaataatgcggtcttctaaaacccaggattcgtgatagctcgactgaaaatagagatcgccataatcaaggcgacgttcggccagttgaccgaggatcgcgaacaagtcctgatgtttcaggccgttcgccgctagcaattgttcacttaccaggttaagactcatcgtttttgctactcgttagttactgcagtagaggattttttacggctgccggatgcggcgtgaacgccctatccagcctacggttatgttccggtttgtaggcctgataagacgcacagcgtcgcatcaggcaacggctgtcggatgcggcgtaaacgccttatccgacctacggttatgttccgtttgtaggcctgataagacgcacagcgtcgcatcaggcaacggctgccggatgcggcgtaaacgccttatccgacctacggttatgttccgtttgtaggcctgataagacgcacagcgtcgcatcaggcaacggctgccggatgcggcgtgaacgccctatccgacctacggttatgttctggctcgttggcctttggcaacgattatcctatgagattggggcaattacgcgccctcgtcaaatcattgcgctttttctttacgcggttggcgcaacacttcgttgatttgcggatcgtccagcggacccgaaatgtgatagcgcaaaatggagactttgctccacagcggccccagcactttactggcggcaaacactgccgcgccaacaatggggttaaccgcaaaagccgcagccacgcccaccgtcgcagaaatctctggtgcgacaaccgcttccatattcaggtcgcgacgtaccagatttaccgaccctttcatggcgatatccgcctccaggccatccaccagcgtgtcgtcggtgtgcataacgccgtctttaatccacgcggtgctgcgaatggagtcaaaatagaacccttcgccaaaagtgtctctgaaatcaaaacgcagcttacgcatcagggcatctacgctcaataagcgcagcaattgcccggcatgtccggtattgatttcggtaatttcgcctttacccagttgagtatgaatgatgccattcaacgtcgcttcatctggctgccagggtgctttgcgccagtgtaaatcgtaatccacattaaatgacgactggcgtatgggcgtcgtgacaccaaaaaattctgcggcggcatcaattttctgcccgcgcagttttcctttcagcgaggtacgttcattccccggattattaacccattcaccatcggcagtaagccgcgagaaaccagtatcaatcagtccattggtcagcgttaacgtatcgccagaaatggtgatatcactgtcaatgcgaccgaatttttgcccccagaaccagcactctgtgcatcgtatttgggcgtccggccagccacggaagttaatgcgctccgttgtcgggaaaggtgatgacggcgttgaatcaccacgagttttcgccacgctcgggttgtaataaagatatttgatattcgccagccacggcgcgttattacgcatcgctagcgtggcgttgatttcacgcccttgcgcttcaaccagggtgccatttgccgtcggttgcgaaacaatactcaggttattccattgctgatttcccagtgacaacataggcgtacgtaacgttatgtgttgtgggaaactcgctgcaccaccgacactctccgcagcgcctttctggaacagggccagccactcggcaccattcatcggcggcatattgagttcaacgccactttgttccggcaacggcgggagcgttttactgtctgccgcccaaatagcacgatcgagcgtcagcttttgaccgagcaaccagcggctattgaaatgattatccgcaccagcctgtccggttaattcaaagctgttgagattgccatcaaccttaacgtttaccgctagtggttcacccgcaggtttggctaacggtgaaggtaagtgactgctcacattctttagatcgccgttcagctctatgttataggtcgcaccagcatgataaggcagatcaatgcccactttaccatcccacgccacgctgccactcaatgcttcgttcaccgcttcaggcagaacgccggttttcgccggttgccagttaccgttgaggtttaccgctacctggtaggcttttgccccttctttggtggaaaaatccacgttcaacggctgattaaaccagcttgctgtcagtggttcactttgcagatcgctattgataaagctgaatttaccgctcaaatttttcagggtgctgtcgagtggtttgataaacagactgttattacgcagcgtcacttcacctttcgcggttaccagttcgccgttcagcgggatatcaagatgtaagcgagcattcacatcgccgtcgagctggagttcttgcagggtcgcacccagagaatctttcagcggtgtctcatcaaagtaagggccaacggctttacccggacctttaatgtcagcgtcaatcagcagtttttcttttgagtagtcagggatcactgcggtaagattactcgcgcgcacgccgcccagattaacgccatcggttttcatccataaaccgtcgttaataaagtccagttcaatatcaaggttagttaatgcaggccagtccggctggaaggcaaacttcgcgttgcgcagcggcaccagcacttcaaactgaccttcgttgtgtttataggggaagagttgcggattgccaccataaaccagcgtcgcgttatccgcttcaccgccctgaatcgcgccacttaagtaatcaaccaggtctttacccatcaagttttccgggaaatagcgccaggcttgtgaaccatcatcggtactgatgccagccagaatacccagccagggttcatcgttagcaggttgcaggtaacgaaaaccgccgcgcgcatggacggctttggctttaacgtcaatattacgcccatccagctggaaacctttgttattgttcagccagcttatagttgcctggccgtcggcgatttctagtggcgcacggaataccgtttcgtaaggcatctttgcctgcttcatcgacgcggtaagcaaaccattttcaacgctgccggaaagcgtcccggagaagtgttccgcacccggtaataatttccattgcttccaggccagatcgctccacgatgcctgaaaacgggtcttgtctgccgcctgaagcgggatatccagcgccagagtgttaatcttgccgctcggttgtgtggagcgccaaacatcacccagtgcaggtgaaagtttcgcggccagcgggcgtatgccctccaggcctgccagctccagattactggcgcgaatccggagttcgtcactgcgtttattgtctttgccgccaacgtcctgttccggtatccaggccagcgtcaatgctccgctcggccagggtttgccgtccatcgtgatccgtgtatcgggaatagagaactgccagcccggattttcacgcgtaatatgcgcggtcagattatccaccgacagcgtatgcgtttgcttctcgcccaaccagctggcaccgccctgtttcagccagacgtcaccgccggttacatcgcctttgtcgatcgtcatccagccttcaagggagaactgtgccgtttccagcgcaatattgtcctgcatccatttaccgagccacggcttcaggtcgatgtcatccgcctggagccagacgcgaccattgcttaacaacccctcatcatcgcgcaaatccatgcgcacctgcatcacgccgtgctgtccggtaaggctggagaggcttaccaggccttccgcacggtgtcgacgtggatcgttcagccaggtgagttgtgggatcgccagctcggcgcgctgaccggatggcgtcaggaaactgacttcactgtcgcgaagatcgaaatggtcaaattgacgaagaaacagatcgctgatgtgactggcttccagactgtcatcactaccaccgctggtgataggagtgttggtgcgaaagcgcagctgccagaaagtgaggtcgcgaaactgccagcgcatatgtaacaggctctgccagacatccagcgccagagtaacgcgtttaaccgaaaattcgccgccatcttttagttctgcacggatgtcgtgtgcttcaagcgtcgggccaaaattctgccagctggctgagagctgactggcttctaccggcatgccagtcgcggattctattttgttgaggatttccggacgccaggcgtcaagatgcggtaaagcaatacgcaggccgctaaccagcagggcagcgatcacaacgagcgcggctccagtaagcagtaaaatccccggcaatcgcctcacccgtcactccttgtctgctaaaaatgtgactcaaaaaccctttgccggatggcggcccagcatctgtttacatcattacgacgtcaaactgctcctggttatagagcggttcaatttgtactttaacctgtttgccaacgaaaatttccacttccgccagcgagtgtgactcttcgcctttcaaggcttcagctactgccggagaagcatagaccaggaaacggtcggagtcgtaagcatggtggacacgaacaatctcgcgcatgatttcatagcataccgtttccacggttttcaccgttccgcgaccgtggcaggttgggcattcgttacacagtacgtgctcaatgctttcgcgggtgcgtttacgcgtcatctccaccagccccagcgccgaaaaaccattaacgctggttttcacccggtctttgctcaacgcctgctccagcgagtgcagcactcggcggcggtgatcttcattattcatatcgatgaaatcaataatgataatcccgcccagattacgcaaccgtaactggcgagcgatagcctgcgtcgcttcaatattggtattgaaaatggtgtcgtccagattgcgatgaccgacaaacgctccggtattgatgtccacggtggtcatcgcttcggtctggtcgataatgagataaccaccggatttcagttctactttgcgttccagcgctcgctggatttcgttttcgacatcaaagagatcgaaaatcggctggcgtcctgtgtaatgctccagcttgcttgtcatctcgggaatgtactccgaggtgaactcaagtaacgcttcgtaagtcaggcgtgagtcaacgcgaatgcggtccagttcggcatcggcgaaatcacgcagaacacgctgcgccagcgccagttcgccgtacagctgataacgggtctgcgggcgttttttacgctccataactttggtccagacgcgtttcagataagcggcatcggaggccagttcagcctcgccaaccccttccgctgcggtacggatgataaacccgccctgctcgtcgcaatactctgcgaccacttttttcaggcgttcacgttctgattcgctttcaatacgttgggaaaccccaacgtgagaagcccctggcataaacaccagatagcgagaagggagcgtgatatcggtggtcaggcgcgcacctttagtgccaagcggatctttcaccacctgcaccatcagatcttgcccctgacgaaccagttccgagatgtcgcgcaccgtgaattgcttttgttcttcacccgccacacattcggtgtgcggcatgatgtcggatgcatgaagaaacgcggctttatccagcccaatatctacaaaagccgcctgcatacccggaagtacacgacttacacgacccttgtagatattgcctactattccgcgtcgcgcctcacgttcaatatgaatttcctgcagaataccgccatcaatatacgccactcgcgtttccgaaggcgttacgtttactaacaattcagccgtcatgtttatcccttttctcacgcagtgcgttaaaattacttaataattcatacgtttcaaccagcggtaagccgactacggcgtgatagctgccatttatcttcctgacaaaacagccacccagcccctgaataccgtatgcacctgctttatctaacggttcatcgctggcgacatagcccgcgatgtcttcgtctgttaacgttctgaaagtcacatcggtgaccaccaggcaatcgagaatgtgctggctgtcggccaacgccactgctgtcatcacctgatgggtctgacccgataatttgcgcaacatctgcgccgcatgctctgcgtcgcgcggtttctccagcacttctccgttcaggataacgatagtatccgcacccagcaccgggagatccttcgccgtttgcgcgacacctgcccgtgctttctcgcgcgccagacgcacaacatactgctgcgcgctctcctgcggctgacgctgctcctcaatgcccgtaacaatacgttcaaaggtcacgccaagttgcgcaagtaactcctgacgacgcggagaaccggaagctaaatacagagaagtcatagaaacctttattgcactgcaaactgctgacggactttgcgcatcagcaagaaaatccacggccagagcaccccattgactacactactccagaacacttccggtctgaaagagacgttaatcactaaaaactctgcccagaaaacaataatatccaccaccagcgaaagcaacatgacgaccagcgcctgctgccataatgcgaggttgcggaaaagctggtatttcagcgccaccaggtaagcaatgatgctcatcgccaatacgcgtacgccaagcgtcgagccgctgatcagatccagtatggcacccatcacaaaacctgtgcccacatttacgcgatgaggcaaggccaggatccaatacaacaagatgagtaacacccagtttggccggaaaacaatcaggttatccggccagggcatgatttgcagcaacagcgcaatgaggaaagagagccagattacccagcgtccctggctacgatagctcgccactattgccctcccggcgcacgcgcaggcggttgagcaccactttgcggcggcgtagccctttgtggagagcgattagcagcaggctgtgtcggcgcagcaggcgcagtagctgcatttcctgtcgccggttgctgcggagtcggctgagcgatccccgttgccggttcaggtaactttggccccatcgcgtctggcgaaggcaatacctgcggcatcatctgcatcagacgttcattagcaacacgatgcacctcttccggcgtcatcgggttagcgccgttacgatctgccccccacagcagcagcagataacgcaaacgttgcagccctgcagtcggacgcgcctgaatcacagtataagcgcgctgggtatcgagttttacggaagagacaaccgcgaccggatagccttccgggaaacgaccgcccagaccggaagtcaccagcacatcaccaacacgaatatccgtattcgccggcagatgctcaagctgcaaatcatccgtacaaccgttaccggctgcaattacgcggatatcgttgcgcagcacctggattggcagcgcgtgggtcgcatcacaaatcagcagcacgcgactggtcagtttagcgacggccaccacctgaccaacaacacctttgtcgctgatgaccggctggccttcataaacgccattaacgctacctttatcgataacaacttgatcgctataaggatcgttaaccgtggagataacctgagtcaccattttctgctcatcctgacgcagcggggaacccagcagctcgcgcagacgcgcgttctcctgtttgtattgtccaagcatcagcagttcactgtttttcagcaacagttcctgacgtaacgcccggttttcaagttctaattggtcacgcgaggccagcgtctgcgatacgccatccagcaattcacgaggagcattggaaacaaagtagaaaggactgacggcggtatccatataagtacggatttgactgaacgtccccaggcggctgtcggcaataataatgccgagcgccaccagcaccgcctgaataaggcgaatctgtagcgacgggccacggctaaaaattggcttcataagttatgcgtattctcgtatcagaccaggcagggtaaacagacacttcccctgcctgcatccgattactcttcgctgaacaggtcgccgccgtgcatgtcgatcatttccagcgctttgccgccaccgcgcgccacacaggtcagcgggtcttcagcaacaacgactggaatgccggtttcttccattaacaaacggtcaaggttacgcagcagtgcgccaccaccggtgagcaccatgccgcgctcggagatgtcggaagccagttccggcgggcactgttccagtgcaaccattaccgcgctcacaataccggtcagcggttcctgcagtgcttcgaggatttcattggagttcagggtaaaaccgcgtggaacaccttctgccaggttacggccacgaacttcgatttcacggacttcatcgcccggataagccgaaccgatttcgtgcttgatacgttctgcggtggcttcaccgatcagagaaccgtaattacgacgcacatagttgatgatagcttcgtcgaaacggtcaccaccaatgcgcacagaagaggagtaaaccacaccgttcaaggagataacagcaacttcagtggtaccaccaccgatatcaaccaccatagaaccggtcgcttcagaaaccggcaggccagcaccaattgcggcagccatcggttcttcaatcaggaagacttcacgggcaccagcgccctgcgcggattcacgaattgcgcggcgttcaacctgggtcgcgccaaccggcacacaaaccagaacgcgcgggcttggacgcataaagctgttgctgtgcacttgtttgatgaagtgctggagcattttttcagtcacgaagaagtcggcgataacgccgtctttcattgggcgaatggcagcaatattgcccggcgtacggcccagcatctgcttcgcgtcatgacctactgcagctacgcttttcggtgaaccggcacgatcctgacgaatggccaccacggaaggctcattcaatacgatgccttgtccttttacataaatgagggtattcgcagtacccaggtcaatggacaagtcattggaaaacatgccacgaaattttttcaacatactaagggataatcctgaaagctggggcggaaaagaaaatccgcttactttaccaaccacacgcagcagcgacaaggcgcaaaaatcatctgctacggtgaaaattagtgcagttcgtttcctttgttacaaatctctgcctgagtccagaaaggcttaatgcatcagcagcattcctcgcctgtttgcaaccgcgtaaggtcattcatctgcatatgtgctgcaacaatctggcgagcagacaagcacactcccatgagacgcagcgcgcattattctacgtgaaaacggattaaacggcaggttaaaccgagtatctttgtgaatattttttcacgttagtatcaagtggctgtgaggacgcgaaaaaatccccttgcccgcctgtaacaccgcgctgaatcagggtctgccactcgcttcgcgaacgcacgccggtggcgtaaacctgggtgctggtcccggagcaggcttccaccaggctttgaaccagcagctggttctccgttcgcttctcaatgtttctgaccagccccggatggagcttgagtaactcaacattaagttctttgatccaactggtacttaccagcgtcaaaccagcctggttgacggctacccgtacccctaaagcattcactaaacgaataacaggttgtaaacgactgatatgttgacctacatcggcctctgcaagttcaataattatgcgttttcgttgtgatttttcacattgcattaacgtatcgcgcagccaacgctgaaaacgcgggcgaatcagcgactcaacggtaacctgaatcgccagattttcctctggccagtaacgcaatagtggaataagacggctgatttgcagacggtcatactcttccgataagccaaactgcaagaccatcggcatatactccgccgagctaacctcttcattaccatcgaagatgcggcacatgagttcgcgatgatgaacctgaccttcgcgagtaaccgccggtttttgataaaggcgcgggccgccgcgactgagcatttgctcgataagcgtacgccagcgaacattaccgcgtcctttttcaggcaacgagtcatcgtaaatagcccagctattgccgccctgcaatcccgcattacgcgtggcagactctgcatgttccattacctgctcggtatcctgaccactacgccaggcgcagataccaatgtggatcatatcgtcgcgatcgagcattttattgttcggcaaggtatcaacggctttgattaactgaccggcgatgctctctgcctcttttaacgtccggtgcggtaacagcgcagcaaaatcactgcggtggtaacgcgccagcagtgcgccagggtagcgcatcataaatgtcgacagcagattcgtcagagtgaagaactgttcttcaacctggctgtgcccccaggtatcgctcaacatattgaaatccggcagacgaatcatcatcacgatcccgtgggtacctactttctcctgatcttccagtaacgttgctaactgattatcgaaaaagagtcggttattgaggccggttttcacgtcctgggcggcataagagcggatcagcgtatcaagacggctgtgttgttcgcgtgcgttctgaatttcacgaagcagcgtatccagcgcactgctggttctgggcggccattcatagatggttcccaacacattagagccacgctcaccgtttaagatacgagtagcccgggtttccagcaattcttgcccggcaagttgccgttgtaaccagcgtaccgccaggaagagcataacaatgataaagccaatcgcccccgtgagcggcgcggtggtcatcaacgaatggaaatagttgcccatcggatcctgataaaccagacgcaacgacatccccggatgctttatcaacggaacgctcagttcgcgaaacagatcgctggagccaactggacgataactaccatttctggccagggtataaacctgtttatcaccatggagcaggtctacacgaacgatatctgccgacatcattaattcggtaatttgtggccttaatacgctgaagtcattcgacacaaggtgggtatcaatcgccgtcgccaccgcctgaacgcgatgactaaacttatactgaatggcgttgtagaaacttagcgaacagcccagcaaagtcacaaaaattgttaacccggtgagcagcgtaacaaaggccgaaaatttcgtcgttaatctcatccttgtgttaactccgatagtgaggaagcgggcatactagcaaatcagatttatctcgcaatttattgcgcttcatcggctttgcttttccattagcgagtatagtcttcagaaattattttccaatccatcatgcacatgaggaccacttatgcaggcgttacttttagaacagcaggacggcaaaactctcgcatcagtacagactctggacgaaagtcgcctgccggagggcgatgtcacggtcgatgttcactggtcgagcctgaactataaagatgcgctggcgattaccggtaagggaaaaatcatccgtaattttccgatgattcctgggatcgattttgccggaactgtacgcaccagcgaagatccgcgttttcatgccggtcaggaggtgttactcactggctggggcgttggtgaaaaccactggggtgggctggcggagcaggcgcgagtgaaaggtgactggctggttgccatgccgcaagggctggacgcgcgtaaagcaatgattatcggtactgccggttttaccgccatgctgtgtgtgatggcgctggaagatgccggtgttcgcccgcaggacggggagattgtcgtgacgggtgccagtggtggcgtcggcagtaccgccgtggcgctgctgcataagttgggttatcaggtcgttgccgtttccggtcgcgaaagtacccatgaatatctgaaaagtttaggtgctagccgtgttctccctcgtgatgagtttgccgaatcccgtcctctggaaaaacaagtctgggctggggcaattgacaccgttggcgacaaagtgctggcaaaagtgctggcgcaaatgaattacggcggctgcgtggcggcctgtggtctggcgggtggttttactctgccaaccacggtcatgccatttattctgcgtaatgtccgtttgcaaggggtggattcagtaatgacgccaccagaacgccgcgcacaagcctggcagcgactggtcgccgatttaccggaatcattctatacccaggcggcaaaagagatatctctgtcagaggcaccgaactttgccgaggccatcattaataaccagatccagggtcgcacgctggtgaaggttaactaaccatttagcagggaataataagagagggaactcattttgaaatcattattcaatcggttaacgggaaaagcggttagccggacagctttcgtcgaacaccttggtcaggaagttatacaacatcatccaaactggaaagtcatgatttcgactgaccacaaattgatgcgcattgatactccactaaacagctattattgatacgcctccgtcgcctgttaggtttatgttgctttgcctgggcgacgctacgcttagccccttacttatttctggtaccatggggtgaataatctgattttgtttgactacaaattaatcactcgaacctatttaatgctgagcattgtcaatcggttaattttgcgtgctttagcattcacatctatccagacgatgcagtgaaaattgggtaatccccagcaaccgctgcgtaatgtcgtctatcttgtcgcgatcctggcatccctacattatttgtggtctgtgaagattatctcattgcagcccctcatcttcgcagggctggcttttcagcttttcaccttacgttataagaagttccgtcgatgatggcgctaatttcgtgaattgtgcggcttgttgcaaattacacggtgttgaaggttatttacatgttagctgttgattatcttccctgataagaccagtatttagctgccaattgctacgaaatcgttataatgtgcgacctcgtcctccctgacgcagtttttgcgctgcggaaaaggtgacattggcgcaacgaaggtatattttgttttttgccggaggatagcagcagatcgctgcacaatgtccgtcaagtctaacattgacactctggggcaaaatagaccggcgtcccggcctgctggaatttatcgctatgcatacagctgtcggggcatacgctttacagacggcggtgaaacgcctgtcacaatcacactaaacaaagagtacggaacccactcatggatattcgtaagattaaaaaactgatcgagctggttgaagaatcaggcatctccgaactggaaatttctgaaggcgaagagtcagtacgcattagccgtgcagctcctgccgcaagtttccctgtgatgcaacaagcttacgctgcaccaatgatgcagcagccagctcaatctaacgcagccgctccggcgaccgttccttccatggaagcgccagcagcagcggaaatcagtggtcacatcgtacgttccccgatggttggtactttctaccgcaccccaagcccggacgcaaaagcgttcatcgaagtgggtcagaaagtcaacgtgggcgataccctgtgcatcgttgaagccatgaaaatgatgaaccagatcgaagcggacaaatccggtaccgtgaaagcaattctggtcgaaagtggacaaccggtagaatttgacgagccgctggtcgtcatcgagtaacgaggcgaacatgctggataaaattgttattgccaaccgcggcgagattgcattgcgtattcttcgtgcctgtaaagaactgggcatcaagactgtcgctgtgcactccagcgcggatcgcgatctaaaacacgtattactggcagatgaaacggtctgtattggccctgctccgtcagtaaaaagttatctgaacatcccggcaatcatcagcgccgctgaaatcaccggcgcagtagcaatccatccgggttacggcttcctctccgagaacgccaactttgccgagcaggttgaacgctccggctttatcttcattggcccgaaagcagaaaccattcgcctgatgggcgacaaagtatccgcaatcgcggcgatgaaaaaagcgggcgtcccttgcgtaccgggttctgacggcccgctgggcgacgatatggataaaaaccgtgccattgctaaacgcattggttatccggtgattatcaaagcctccggcggcggcggcggtcgcggtatgcgcgtagtgcgcggcgacgctgaactggcacaatccatctccatgacccgtgcggaagcgaaagctgctttcagcaacgatatggtttacatggagaaatacctggaaaatcctcgccacgtcgagattcaggtactggctgacggtcagggcaacgctatctatctggcggaacgtgactgctccatgcaacgccgccaccagaaagtggtcgaagaagcgccagcaccgggcattaccccggaactgcgtcgctacatcggcgaacgttgcgctaaagcgtgtgttgatatcggctatcgcggtgcaggtactttcgagttcctgttcgaaaacggcgagttctatttcatcgaaatgaacacccgtattcaggtagaacacccggttacagaaatgatcaccggcgttgacctgatcaaagaacagctgcgtatcgctgccggtcaaccgctgtcgatcaagcaagaagaagttcacgttcgcggccatgcggtggaatgtcgtatcaacgccgaagatccgaacaccttcctgccaagtccgggcaaaatcacccgtttccacgcacctggcggttttggcgtacgttgggagtctcatatctacgcgggctacaccgtaccgccgtactatgactcaatgatcggtaagctgatttgctacggtgaaaaccgtgacgtggcgattgcccgcatgaagaatgcgctgcaggagctgatcatcgacggtatcaaaaccaacgttgatctgcagatccgcatcatgaatgacgagaacttccagcatggtggcactaacatccactatctggagaaaaaactcggtcttcaggaaaaataagactgctaaagcgtcaaaaggccggattttccggccttttttattactggggatcgacaacccccataaggtacaatccccgctttcttcacccatcagggacaaaaaatggacactcgttttgttcaggcccataaagaggcgcgctgggcgctggggctgacccttttgtatctggcagtttggttagtagccgcttacttatctggcgttgcccccggttttaccggctttccgcgctggtttgagatggcctgcatcctgacgccgctgctgtttattggactgtgctgggcgatggtgaaatttatctatcgcgatatcccactggaggatgacgatgcagcttgaagtaattctaccgctggtcgcctatctggtggtggtgttcggtatctcggtttatgcgatgcgtaaacggagcaccggcaccttccttaatgagtatttcctcggcagccgctctatgggcggtattgtgctggcgatgacgctcaccgcgacctatatcagtgccagttcgtttatcggcgggccaggagctgcttataaatacgggctgggctgggtattgctggcgatgattcagcttcctgcagtctggctttcactcggtattctcggcaagaagtttgcgattcttgcgcgccgctacaatgcagtgacgctgaacgatatgctgtttgcccgctaccagagtcgtcttctggtgtggctggcgagtttgagtttgctggttgcgttcgttggtgcgatgaccgtgcagtttatcggcggtgcgcgcctgctggaaaccgcggcgggtattccttatgaaaccgggctgctgatttttggtatcagcattgcgttatataccgcctttggtggctttcgcgccagcgtgctgaacgacaccatgcaagggcttgtgatgctgattggcaccgttgtgctgcttattggcgtagtacatgccgctggcggcttaagtaacgcagtacagaccttgcaaaccatcgatccgcaactggttacgccacaaggcgctgacgatattctgtcgcctgcctttatgacgtcgttctgggtactggtgtgttttggcgtgattggcctgccgcatactgcggtgcgctgtatctcttataaagacagcaaagccgtacatcgggggatcatcatcggtacgattgtggtcgcaattctgatgttcggtatgcacctggccggagcgttaggtcgggcggtgatccccgatctcaccgtaccggacctggtgatcccaacgttaatggtaaaagtgctgccaccgtttgctgccgggatcttcctggctgcaccgatggctgcgatcatgtcgacaattaacgcccaactgctgcaaagttccgctacgatcattaaagatctctatctgaatatccgtccggatcaaatgcaaaacgagacgcgtctgaagcggatgtcggcggtaattacgttagttctcggcgcgttgctgctgcttgccgcctggaagccgccagaaatgatcatctggctgaatttgttggccttcggtgggctggaagccgttttcctgtggccgctggtgctgggtctttactgggaacgcgccaacgccaaaggcgcgctaagtgcgatgatcgttggcggcgtgctgtatgccgtactcgcgacgctgaatattcagtacctgggcttccaccctatcgtgccctcgttactactaagtttgctggctttcctggtcggaaaccgtttcggtacatccgtcccgcaagctaccgttttgactactgataaataaagagttttgccatgccttggatccaactgaaactgaacaccaccggcgcgaacgcggaagatcttagcgatgcgctgatggaagcgggtgccgtttctatcacttttcaggatacccacgatacgccagtatttgaaccgctgccgggcgaaacgcgcctgtggggcgacaccgatgtgattggtctgttcgacgctgaaaccgatatgaacgacgtggtggcgattctggaaaaccatccgctgctcggcgcaggcttcgcgcataaaatcgaacaactagaagataaagactgggagcgcgaatggatggataatttccacccgatgcgctttggtgaacgactgtggatctgccctagctggcgtgatgtgccggacgaaaacgccgtcaacgtgatgttagatccagggctggcgtttggtacgggtacccatccaaccacctctctgtgcctgcaatggctcgacagcctcgatttaaccggtaaaacagtcatcgactttggctgtggttccggcattctggcgatcgcggcgctgaaactgggtgcagcaaaagccattggtattgatatcgatccgcaggcgattcaggccagccgcgataacgccgaacgtaatggcgtttctgaccgtctggaactctacttaccgaaagatcagccagaagaaatgaaagccgacgtggtggtcgctaacatccttgcaggcccattacgtgaactggcaccgttaatcagcgtcctgccggtttcaggcggtttgctgggcctttccggtattctggcaagccaggcagagagcgtttgtgaagcttatgccgatagcttcgcactggacccggtcgtggaaaaagaagagtggtgccgtattaccggtcgtaagaattaaccttcgcatcgccgtagggtgacgcggggcgaagtgcgagcaagctcacaaaaggcacgtaaatttgccgattatttacgcaaatttgcgtgccaaaattttcattcataaagaaaaattgagaacttactcaaatttctttgagtgtaaattttagtcactattttctaatatgatgatttttatgagtaattatcgcaccacgctcattttaaatgcaattctttgatccatctcagaggattggtcaaagtttggcctttcatctcgtgcaaaaaatgcgtaatatacgccgccttgcagtcacagtatggtcatttcttaactcatgcgcatcggacaatatcagctcagaaatcgcctgatcgcagcgcccatggctggcattacagacagaccttttcggacgttgtgctacgagatgggagccggattgacagtatccgagatgatgtcttctaacccacaggtttgggaaagcgacaaatctcgtttacggatggtgcacattgatgaacccggtattcgcaccgtgcaaattgctggtagcgatccgaaagaaatggcagatgcagcacgtattaacgtggaaagcggtgcccagattattgatatcaatatgggttgcccggctaaaaaagtgaatcgcaagctcgcaggttcagccctcttgcagtacccggatgtcgttaaatcgatccttaccgaggtcgtcaatgcagtggacgttcctgttaccctgaagattcgcaccggctgggcaccggaacaccgtaactgcgaagagattgcccaactggctgaagactgtggcattcaggctctgaccattcatggccgtacacgcgcctgtttgttcaatggagaagctgagtacgacagtattcgggcagttaagcagaaagtttccattccggttatcgcgaatggcgacattactgacccgcttaaagccagagctgtgctcgactatacaggggcggatgccctgatgataggccgcgcagctcagggaagaccctggatctttcgggaaatccagcattatctggacactggggagttgctgcccccgctgcctttggcagaggttaagcgcttgctttgcgcgcacgttcgggaactgcatgacttttatggtccggcaaaagggtaccgaattgcacgtaaacacgtttcctggtatctccaggaacacgctccaaatgaccagtttcggcgcacattcaacgccattgaggatgccagcgaacagctggaggcgttggaggcatacttcgaaaattttgcgtaaacagaaataaagagctgacagaactatgttcgaacaacgcgtaaattctgacgtactgaccgtttctaccgttaactctcaggatcaggtaacccaaaaacccctgcgtgactcggttaaacaggcactgaagaactattttgctcaactgaatggtcaggatgtgaatgacctctatgagctggtactggctgaagtagaacagcccctgttggacatggtgatgcaatacacccgtggtaaccagacccgtgctgcgctgatgatgggcatcaaccgtggtacgctgcgtaaaaaattgaaaaaatacggcatgaactaattcaggttagctaaatgcttgattaaaaaggcgctactcggcatggggaagcgccttttttataggtgtcacaaagggagtgaccatgagaacaggatgtgaaccgacccggtttggtaatgaagctaagaccattattcacggtgatgcgcttgccgaacttaaaaagatccccgccgaaagtgtcgatctgatctttgccgacccaccatataacatcggtaaaaattttgatggtctgatcgaagcctggaaagaagatctgtttatcgactggctgtttgaagtgattgcagagtgccaccgcgttctgaaaaagcagggcagcatgtacatcatgaacagtacggaaaacatgccctttatcgatctccagtgccgcaagctttttaccatcaaaagtcgcatcgtctggtcatatgacagttctggagtgcaggcgaaaaaacactacggctccatgtacgaacccatcctgatgatggtgaaagacgcaaagaactacacattcaacggtgatgctattctggtagaagccaaaaccggatcgcagcgcgcgttgatcgattatcgcaaaaatcctccacagccttacaatcatcaaaaagtaccgggtaacgtttgggattttccgcgcgtgcgttatttgatggatgaatatgaaaaccacccgacgcaaaaaccggaagccttactgaaacgcattattctcgcctcttccaacccaggcgatatcgttctcgacccgtttgctggtagctttactaccggtgccgtagccatcgccagcggacgaaaattcattggtattgagatcaacagcgagtacatcaaaatggggcttcgacggctggatgtcgcgtcgcattactctgcggaagaactggcgaaagtgaaaaaaagaaagaccggcaacctgtcaaaacgaagccggttaagcgaagttgaccccgatctcattacaaagtaaaggatgtgtaagcctggttttcagattattcatttcgtgtatatttcctgccagacttggttaaacatgcacaggctcaggtaatgattcgcaagtattggtggctcgtcgttttcgctgtcttcgtttttctgtttgatactttactgatgcagtggattgaactgctggcaacagaaacagacaaatgccgcaatatgaactcagttaatccactaaaactggttaactgtgacgaactgaattttcaggacagaatgtgaatttacatgacacttaattcattcgtttgatgaattaatttcgttatgttttcatctggcatgaacattcttaatacgttatcgaccagagcgggggcttgtttataaagatcataacccgccatattcattaaccagttttgaacaattccgctgaaggcaccatcaataataatcatcacaacatctaaatcgaggttatttgctacacaaccttgttgctgacacgcctgcaatacttcgcggagagtctgcggattaaagcccatcttttcgcgtatcactccctcggccagcatctcatcattaaattcacatttgtgatataagattttcagcaacgcctgctggcggggaattttggcaatatattgcaagccgacaatcaatttttcacgcaattgttgaaacgggtcatgctctaatccagccgtcaagtgttcctggattaactcccgcaatgaaggctgttgcaaccacatctcattaaacagttgagtcttgttttcgaagtgccagtagatagcgccacgcgtaacgttagcggcgtcggcaatgtcgttgagcgtcgtcttgcttacgccatgctgcgcaaactgggcgatggcagtttcaatcagttcttgccgggtcttcagagcttcggctttggttctttttgccatgattaattattcaggaaataaatatattcgacacagagtgagaaaatagcgaaggttaatctatcacctaatgtgtatttatacgagaggctaatattgagttgctataaatcgttaaataaataatatatattatttacctaagatacattcactacatcaatatatatttcaatttacgaggttttaattctgcctctttcaacccgcgtcaaaataaaacagtagaatattaatctttttttgtgtttatgtgccttgagatgcctgtattcataactattccttacatcgacgaatgataatttgtaggatagcgaactgtatttttctttctgcgagttaacgcgttgcctttttgggtaaataacgcgcttttggttttttgaggaatagtaatgacgaaacatgccaggtttttcctcctgccctcctttattctgatctccgcggctttaatcgccggttgtaacgataagggagaagagaaagctcacgtcggtgaaccgcaggttaccgttcatattgtaaaaacggccccgttagaagttaagactgaattaccaggccgcaccaatgcttatcgtatagccgaagttcgcccacaggttagcgggatcgtactgaatcgcaatttcactgaaggcagcgatgtgcaagcaggccagtccctgtaccagatcgatcccgcgacctatcaggcaaattatgacagcgcgaaaggcgaactggcgaaaagtgaagccgccgccgccatcgcgcatttgacggtaaaacgttacgttccgctcgtgggtacgaaatacatcagccagcaggagtacgaccaggccattgctgatgctcgtcaggccgatgccgccgtgattgccgcaaaagccacagtcgaaagcgctcgcatcaatcttgcttataccaaagtcactgcgccaattagcggacgtatcggcaaatcgactgtgaccgaaggcgctcttgtcactaatgggcaaacgactgaactggcgactgtccagcagctcgatcctatctacgttgatgtgacccaatccagcaacgattttatgaggctgaagcaatccgtagagcaaggaaatttgcataaggaaaacgccaccagcaacgtagagttggtcatggaaaacggtcaaacctatcccctgaaaggtacgctgcaattctccgatgtgaccgttgatgaaagcaccggctccataaccctacgtgctgtcttccctaacccgcaacatacgcttttgccgggtatgtttgtgcgtgcacggattgatgaaggcgtccaacctgacgccattcttatcccgcaacaaggcgttagccgcacaccgcgtggtgatgcaaccgtgctgattgttaacgataaaagtcaggttgaagcgcgccctgtcgttgccagtcaggcgattggcgataaatggttgattagtgaaggactgaaatctggcgatcaagtcattgtcagcggcctgcaaaaagcgcgtccgggagagcaggttaaagccactaccgatacccccgcagatactgcatcgaagtaaggtaatctgacatggcaaacttttttattcgacgaccgatatttgcatgggtgctggccattattctgatgatggcgggcgcactggcgatcctacaattgcccgtcgctcagtatccaacaattgcaccgcctgcggtttctgtttcagcaaactatccgggcgctgatgcgcagaccgtgcaggatacggtgacgcaggttatcgaacagaatatgaacggtatcgataacctgatgtatatgtcctccaccagcgattccgccggtagcgtgacaattacccttaccttccagtccgggaccgatcctgatatcgcgcaagtgcaggtgcagaacaaactccagctcgccacgccgttgctgccgcaggaggttcagcagcaggggatcagtgttgaaaagtccagtagcagctatttgatggtggcgggctttgtctctgataacccaggcaccacacaggacgatatctcggactatgtggcctctaacgttaaagatacgcttagccgtctgaatggcgtcggtgacgtacagcttttcggcgcacagtatgcgatgcgtatctggctggatgccgatctgctaaacaaatataaactgacaccggttgatgtgattaaccagttgaaggtacagaacgatcagatcgctgccggacagttgggcggaacgccagcgttaccagggcaacaattgaacgcctcgattattgctcagacgcggtttaaaaatccggaagaattcggcaaagtgaccctgcgcgtaaacagtgacggctcggtggtacgcctgaaagatgtcgcacgggttgaacttggcggtgaaaactataacgttatcgctcgtatcaacggaaaaccggcggcgggcctggggattaagctggcaaccggcgcgaatgctctcgataccgcgaaagccattaaggcaaaactggcggaattacagccattcttcccgcagggaatgaaggttctctacccttatgacaccacgccattcgtccagctttctattcacgaagtggtaaaaacgctgttcgaagccattatgctggtgttcctggtgatgtatctgttcttgcagaatatgcgagcaacgctgatccccaccattgcggtacccgtggtgttgttagggacgtttgccatcctcgccgcttttggttactccatcaacacactaacgatgttcgggatggtgcttgccatcgggctgctcgtcgatgatgcgatagtggtggtggagaacgtcgagcgcgtgatgatggaggataagctcccgccaaaagaagcgacggaaaaatcgatgtcgcaaattcagggcgcactggtgggtatcgcgatggtgctgtcagcggtatttattccgatggcattcttcggcggttctactggggcaatttatcgccagttctctatcaccatcgtttcggcaatggcgctttctgttctggtggcattgattcttacccctgcgttatgtgcaacgctgcttaaacccgtctctgctgagcatcacgaaaataagggcggtttcttcggttggtttaataccaccttcgatcatagcgttaaccactacaccaacagcgtcggcaaaatcctcggatccacaggacgatatttactgatctatgcgctgattgttgcaggaatggtggtgttgtttttacgtcttccgtcttccttcttacctgaagaggatcagggtgtctttctgaccatgattcagttacccgctggcgcgacgcaagagcggacgcaaaaagtgttggatcaagttacggattactatctgaagaacgagaaagcgaacgttgaaagtgtctttacggttaacggctttagcttcagcggccaggcacaaaacgccggtatggccttcgtcagtctgaaaccgtgggaagagcgtaatggtgacgaaaacagtgcggaagcggtaatccatcgtgccaaaatggaattgggcaagatccgcgacggttttgtcattccattcaatatgccagccattgttgaactgggcacggcaacgggtttcgactttgagttaattgatcaggctgggctgggtcacgatgccctaacccaggcccgtaaccagttgcttggtatggcggcgcaacatcctgccagcttagtcagcgtgcgccctaatggcctggaagacaccgcgcagtttaaactggaagttgaccaggaaaaggcgcaggcattaggtgtttcactttctgacatcaatcagaccatttcaacggcgctgggtgggacttacgttaacgacttcatcgaccgtggccgcgtgaaaaagttgtatgttcaggcggatgccaaattccgtatgctgccagaagatgtcgataaactttatgtccgcagcgccaacggcgaaatggtgccattctcggcctttaccacttcacattgggtgtatggctctccgcgactggaacgctacaacggtctgccgtcaatggagattcagggggaagccgcgccaggaaccagttccggcgatgccatggcgttgatggaaaaccttgcgtcaaaattacctgcgggcattggttatgactggacgggtatgtcgtatcaggaacgcttatcgggaaaccaggctcccgctctggtagcaatttcctttgtggttgttttcctgtgccttgctgcactctatgaaagctggtcaattcctgtctcggttatgttggtagtgccgttagggattgtcggcgtgctgctggcggcgacactctttaatcaaaaaaatgacgtctactttatggtgggcttgctaacgacaattggcttgtcggccaaaaacgctattttgatcgttgagttcgctaaagatctcatggagaaagagggtaaaggtgttgttgaagcgacactgatggcagtacgtatgcgtctgcgtcctatcctgatgacctctctcgcctttattctcggcgtattaccgctagctatcagtaacggtgccggcagtggcgcgcagaacgctgtgggtatcggggtaatgggaggaatggtctctgcaacgttgctggcaatcttcttcgtaccggtgttctttgtggtgatccgccgttgctttaaaggataaatcagaaacataaaggcgctttcgggtgcctttattatttccagtgaaacccataaaaattaataagatattcttctgctcactctttaaaagctttctatagttcccgctcccttcactatttttacaattcacataatttgtcattattcattccgcaagatttataacctccggtgataaaatggcattcagctcgttaataagagagttaacttattaagcgttagcgtttattactgaggtaacaccatgaaaagattaattcctgtggcattgctcaccgcattgctggcgggctgtgctcacgattcgccctgcgttccggtttatgacgatcagggtcgtctggttcacaccaatacctgtatgaaaggcacgactcaggataactgggaaacggctggggctattgccggcggggcagctgctgttgctggcctgacgatggggatcatcgctctatcgaaataactgaacagggcgcggagttccgcgctctttttaacgatacagtatctctccataagataaaatattgctatattctgctgggtaattccctgctgatttagcatgttacatcgcgttatttcgctgctttcgaaataacgcatcaatttaattttcacacttcccaccagaaatatactcacgctaacaatcattattctgcttagtaaaacacgcgtaaatattttgcgccaaaatgtggcgcatgtttcattttcgcaccattgcggggcgctgtttttattatttcctgtctacactcagcttattgcgacgcgaaatcgtgcgcaaaagctggcactacttttgcttataagaggatggccacagacaggtaaaagacgtttcccaaacgtcctataacgataattttcgcctcacaggaagcattatgaaaaagatgatgatagccacactggctgccgccagcgtgctgcttgccgttgcaaatcaggcgctgctggcgcgacgcttgatgccgttcagaaaaaaggttttgtgcaatgcgggatcagtgatggattacctgggttctcttatgccgatgctgacggtaagttttcaggtattgatgttgatatttgtcgtggtgttgccgctgctgtatttggtgacgacacgaaagtgaaatataccccgctcactgcaaaagaacgcttcaccgctttacagtcaggggaggtggatttgctctcccgtaatacgacctggacttcatctcgcgatgccgggatgggaatggcatttaccggcgtcacttattacgacggcattggcttcctgacgcacgataaagcggggctaaaaagcgcgaaagaactggatggcgctaccgtctgtattcaggcgggtactgataccgaactcaacgtcgccgactacttcaaggcaaacaatatgaagtacacaccggtgactttcgatcgctctgacgaatcagcgaaggcactggaatctggtcgctgcgatacgctggcctcggatcaatcacaactgtatgccctgcgcatcaaattaagcaacccagctgaatggattgtcttaccggaagttatctcaaaagaaccgcttggtccggtagttcgtcgtggcgatgatgaatggttctcgattgtacgctggacgcttttcgccatgctgaatgctgaagagatgggcatcaattcccagaacgtcgatgaaaaagcggctaatccagcaacgcctgatatggcacatctgctgggtaaagaaggcgattacggcaaggatctgaagctggataataaatgggcctataacatcatcaaacaggtgggtaactactcggaaatttttgagcgtaacgtaggttcagaaagcccgctgaaaattaaacgtgggcaaaataatctctggaataacggcggtattcagtacgcaccgcccgtgcgttaagtcggtgtgaggtaacgagcgtcgctacggcggcgctctcttcagcgttatgctttccgaggtttctatgtctcatcgccgctcaaccgttaaaggctcactctcttttgccaaccctacggttcgcgcctggttattccagatccttgccgttgttgctgttgtcggcattgttggttggttatttcacaacactgtaacgaatctcaataatcgtggcattacttcaggttttgcctttctggatcgcggcgctggcttcggtattgtccagcatttgatcgattaccagcagggcgacacctacggacgcgtttttattgtcggcttactcaatacgctactggtttctgcattgtgtattgtgttcgcttctgttttgggcttctttatcggtctggcgagactttcggataactggctgctacgaaagctttccacaatttatattgagatcttccgtaatattcccccgctgctgcaaatcttcttctggtactttgccgtgttgcgcaatttgcccggaccacgccaggctgtgagcgcgtttgatctggcctttttgagcaatcgtgggctttatattccgtcaccgcagctgggagacggatttattgcgtttatcctggctgttgttatggctatagtcctttctgttgggctattccgctttaataaaacataccagataaagaccggacaactgcgccgcacctggccgatcgccgcagtgttgatcattggtttgcctttactggcgcaatggctttttggcgcagcactacactgggatgtcccagccctacgaggctttaacttccgcggcgggatggttttaattcctgaactggcagccttaacgctggcactttcggtttatacatctgcatttatcgccgagattatccgcgctgggatccaggcagtgccttatggtcaacatgaagcggctcggtcactgggattacccaacccggttacgctacgccaggtcattattccccaggcattgcgggtgattattccaccgttaaccagccagtatctcaacatcgtcaaaaactcctctcttgccgccgctattggctatcccgatatggtttcgctgtttgccggcaccgtgctgaatcagacggggcaagccatcgagacgatagccatgaccatgtcggtctatctgattatcagcctgactatctcgctgctgatgaatatctataaccgccgcatcgcgatcgttgaacgctaaggagtcatgatgacaaaagtattgctgtctcatcccccgcgcccggcgagccataactcaagccgcgcgatggtgtgggtgcgaaaaaatctgttctccagctggagcaatagcctgctgactattggctgcatatggttgatgtgggaactgatcccaccgttgctgaactgggcatttttgcaggctaactgggttggctcaacgcgtgccgactgcacaaaagccggtgcctgttgggtcttcatccacgaacgatttggtcagtttatgtatgggctttacccacacgaccaacgctggcgaattaacctcgcattactgattgggcttgtgtcgatcgcaccaatgttctggaaaatactcccgcatcgcggtcgctatattgcggcctgggcggtgatttacccactgattgtctggtggctgatgtatggcggtttttttgctcttgagcgggttgaaacccggcaatggggcgggctgacgctaactttaattattgcatcagttgggattgcgggggcgctaccgtgggggatcttactggcgttaggtcgccgctcccatatgccgattgtgcgtatcttatcggtcatttttatcgaattctggcgcggcgtgccgctgattaccgttctgtttatgtcttcggtcatgctgccgttgtttatggcagaaggcaccagtatcgacaaattgatccgcgcgctggttggcgtgatcctgtttcagtcagcatatgttgcggaagtcgtgcgaggtggattacaggcgctgcctaaagggcaatatgaagcggcagagtcgctggcgttgggttactggaaaactcaggggctggttattctgccacaggcgttgaagctggtaattcctgggctggtaaataccatcatcgcactcttcaaagataccagcctggtgatcattatcgggttgttcgatcttttcagtagcgttcagcaggcaaccgttgatcccgcctggttgggtatgtcgacggaagggtatgttttcgccgcgctgatctactggatcttctgtttcagcatgtcgcgctatagccagtatctggaaaaacgttttaacaccgggcgtacaccgcattgaggacactatgagccaaattttactgcaacctgctaacgcgatgattacgctggaaaacgtcaataaatggtatggacaattccatgttttgaaaaatataaatttaaccgtgcaaccgggagaacggatcgttctgtgtggcccttcaggttccggtaaatcgacaaccattcgttgtattaatcatctggaagaacatcaacagggacggatcgtggtagatggcatcgaacttaatgaagatatccgcaatattgagcgcgtcaggcaggaagtgggaatggtctttcagcatttcaatctcttccctcatctgaccgttttacagaactgtaccctggcaccgatttgggtacgcaagatgcctaagaaagaggctgaagatctggcggtgcattacctagagcgggtgagaattgccgaacatgcgcataagtttcccggacagatttcaggtggtcagcagcaacgcgttgccattgcgcgttcgctgtgtatgaagccgaaaattatgttgtttgatgagccaacgtcggcgctcgatcctgagatggtgaaagaggtgctggatacgatgattgggctggcgcagtcgggtatgacaatgttgtgtgtaacacatgagatggggtttgcacgaaccgtcgctgaccgggtaatttttatggatcgtggggaaatagtggagcaagctgcacctgatgaattttttgcgcatcctaaatcagagcgtacgagggcatttttatcgcaggtaatccattaattgaatgttagttcgaaaagcaaaaaggccatcctttcggatggcctttcgcttgatttgatgtctggcagtttatggcgggcgtcctgcccgccaccctccgggccgttgcttcgcaacgttcaaatccgctcccggcggatttgtcctactcgggagagtgttcaccgacaaacaacagataaaacaaaaggcccagtcttccgactgagccttttgttttatttgatgtctggcagttccctactctcgcatggggagaccccacactaccatcggcgctacggcgtttcacttctgagttcggcatggggtcaggtgggaccaccgcgctactgccgccagacaaattcttttctaatctgccgaactttaacctaaaaagtggtgctgatacccagagtcgaactggggacctcacccttaccaagggtgcgctctaccaactgagccatatcagcacgctaaatttgatgcctggcagttccctactctcgcatggggagaccccacactaccatcggcgctacggcgtttcacttctgagttcggcatggggtcaggtgggaccaccgcgctacggccgccaggcaaattctgttttatcagaccgcttctgcgttctgatttaatctgtatcaggctgaaaatcttctctcatccgccaaaacagcttcggcgttgtaaggttaagcctcacggttcattagtaccggttagctcaacgcatcgctgcgcttacacacccggcctatcaacgtcgtcgtcttcaacgttccttcaggacccttaaagggtcagggagaactcatctcggggcaagtttcgtgcttagatgctttcagcacttatctcttccgcatttagctaccgggcagtgccattggcatgacaacccgaacaccagtgatgcgtccactccggtcctctcgtactaggagcagcccccctcagttctccagcgcccacggcagatagggaccgaactgtctcacgacgttctaaacccagctcgcgtaccactttaaatggcgaacagccatacccttgggacctacttcagccccaggatgtgatgagccgacatcgaggtgccaaacaccgccgtcgatatgaactcttgggcggtatcagcctgttatccccggagtaccttttatccgttgagcgatggcccttccattcagaaccaccggatcactatgacctgctttcgcacctgctcgcgccgtcacgctcgcagtcaagctggcttatgccattgcactaacctcctgatgtccgaccaggattagccaaccttcgtgctcctccgttactctttaggaggagaccgccccagtcaaactacccaccagacactgtccgcaacccggattacgggtcaacgttagaacatcaaacattaaagggtggtatttcaaggtcggctccatgcagactggcgtccacacttctaagcctcccacctatcctacacatcaaggctcaatgttcagtgtcaagctatagtaaaggttcacggggtctttccgtcttgccgcgggtacactgcatcttcacagcgagttcaatttcactgagtctcgggtggagacagcctggccatcattacgccattcgtgcaggtcggaacttacccgacaaggaatttcgctaccttaggaccgttatagttacggccgccgtttaccggggcttcgatcaagagcttcgcttgcgctaaccccatcaattaaccttccggcaccgggcaggcgtcacaccgtatacgtccactttcgtgtttgcacagtgctgtgtttttaataaacagttgcagccagctggtatcttcgactgatttcagctccacgagcaagtcgcttcacctacatatcagcgtgccttctcccgaagttacggcaccattttgcctagttccttcacccgagttctctcaagcgccttggtattctctacctgaccacctgtgtcggtttggggtacgatttgatgttacctgatgcttagaggcttttcctggaagcagggcatttgttgcttcagcaccgtagtgcctcgtcatcacgcctcagccttgattttccggatttgcctggaaaaccagcctacacgcttaaaccgggacaaccgtcgcccggccaacatagccttctccgtccccccttcgcagtaacaccaagtacaggaatattaacctgtttcccatcgactacgcctttcggcctcgccttaggggtcgactcaccctgccccgattaacgttggacaggaacccttggtcttccggcgagcgggcttttcacccgctttatcgttacttatgtcagcattcgcacttctgatacctccagcatgcctcacagcacaccttcgcaggcttacagaacgctcccctacccaacaacgcataagcgtcgctgccgcagcttcggtgcatggtttagccccgttacatcttccgcgcaggccgactcgaccagtgagctattacgctttctttaaatgatggctgcttctaagccaacatcctggctgtctgggccttcccacatcgtttcccacttaaccatgactttgggaccttagctggcggtctgggttgtttccctcttcacgacggacgttagcacccgccgtgtgtctcccgtgataacattctccggtattcgcagtttgcatcgggttggtaagtcgggatgacccccttgccgaaacagtgctctacccccggagatgaattcacgaggcgctacctaaatagctttcggggagaaccagctatctcccggtttgattggcctttcacccccagccacaagtcatccgctaatttttcaacattagtcggttcggtcctccagttagtgttacccaaccttcaacctgcccatggctagatcaccgggtttcgggtctataccctgcaacttaacgcccagttaagactcggtttcccttcggctcccctattcggttaaccttgctacagaatataagtcgctgacccattatacaaaaggtacgcagtcacacgcctaagcgtgctcccactgcttgtacgtacacggtttcaggttctttttcactcccctcgccggggttcttttcgcctttccctcacggtactggttcactatcggtcagtcaggagtatttagccttggaggatggtccccccatattcagacaggataccacgtgtcccgccctactcatcgagctcacagcatgtgcatttttgtgtacggggctgtcaccctgtatcgcgcgcctttccagacgcttccactaacacacacactgattcaggctctgggctgctccccgttcgctcgccgctactgggggaatctcggttgatttcttttcctcggggtacttagatgtttcagttcccccggttcgcctcattaacctatggattcagttaatgatagtgtgtcgaaacacactgggtttccccattcggaaatcgccggttataacggttcatatcaccttaccgacgcttatcgcagattagcacgtccttcatcgcctctgactgccagggcatccaccgtgtacgcttagtcgcttaacctcacaacccgaagatgtttcacttcagagttgcgaaaatttgagagactcacgaacaactttcgttgttcagtgtttcaattttcagcttgatccagatttttaaagagcaaaacttcgcagtgaacctttgcaggtacactctgaagtattttttatttaatcactacagagatggtggagctatgcgggatcgaaccgcagacctcctgcgtgcaaagcaggcgctctcccagctgagctatagccccataacatgtagttaaaacctcttcaaatttgccgtgcaaatttggtaggcctgagtggacttgaaccaccgacctcacccttatcaggggtgcgctctaaccacctgagctacaagcctgtagaggttttactgctcattttcatcagacaatctgtgtgagcactgcaaagtacgcttctttaaggtaaggaggtgatccaaccgcaggttcccctacggttaccttgttacgacttcaccccagtcatgaatcacaaagtggtaagcgccctcccgaaggttaagctacctacttcttttgcaacccactcccatggtgtgacgggcggtgtgtacaaggcccgggaacgtattcaccgtggcattctgatccacgattactagcgattccgacttcatggagtcgagttgcagactccaatccggactacgacgcactttatgaggtccgcttgctctcgcgaggtcgcttctctttgtatgcgccattgtagcacgtgtgtagccctggtcgtaagggccatgatgacttgacgtcatccccaccttcctccagtttatcactggcagtctcctttgagttcccggccggaccgctggcaacaaaggataagggttgcgctcgttgcgggacttaacccaacatttcacaacacgagctgacgacagccatgcagcacctgtctcacggttcccgaaggcacattctcatctctgaaaacttccgtggatgtcaagaccaggtaaggttcttcgcgttgcatcgaattaaaccacatgctccaccgcttgtgcgggcccccgtcaattcatttgagttttaaccttgcggccgtactccccaggcggtcgacttaacgcgttagctccggaagccacgcctcaagggcacaacctccaagtcgacatcgtttacggcgtggactaccagggtatctaatcctgtttgctccccacgctttcgcacctgagcgtcagtcttcgtccagggggccgccttcgccaccggtattcctccagatctctacgcatttcaccgctacacctggaattctacccccctctacgagactcaagcttgccagtatcagatgcagttcccaggttgagcccggggatttcacatctgacttaacaaaccgcctgcgtgcgctttacgcccagtaattccgattaacgcttgcaccctccgtattaccgcggctgctggcacggagttagccggtgcttcttctgcgggtaacgtcaatgagcaaaggtattaactttactcccttcctccccgctgaaagtactttacaacccgaaggccttcttcatacacgcggcatggctgcatcaggcttgcgcccattgtgcaatattccccactgctgcctcccgtaggagtctggaccgtgtctcagttccagtgtggctggtcatcctctcagaccagctagggatcgtcgccttggtgagccgttaccccaccaacaagctaatcccatctgggcacatccgatggcaagaggcccgagggtccccctctttggtcttgcgacgttatgcggtattagctaccgtttccagtagttatccccctccatcaggcagtttcccagacattactcacccgtccgccactcgtcagcgaaacagcaagctgtttcctgttaccgttcgacttgcatgtgttaggcctgccgccagcgttcaatctgagccatgatcaaactcttcaatttaaaagtttgatgctcaaagaattaaacttcgtaatgaattacgtgttcactcttgagacttggtattcatttttcgtcttgcgacgttaagaatccgtatcttcgagtgcccacacagattgtctgataaattgttaaagagcagttgcgacgcggctttcagctcactgtcgcgaggtggcgtatattacgctttcctctttcagagtcaaccctgaatttcaggatttttttctcttcgttgttccgaccatcctgtgaagtgtttcacgttgtcgtctcaacggaggcgcattatagggatcccaattttttgcacaagtatttttttgatctttttttctgtttgttgttttttcaccctttttgctgcaatcgcacacaaaacggtgcttttttgcatactaaaagacttgcacaaggccaataatgcccccaaagtcattagtaaatcatttattgctgaggtaagtatgtctgatgttttacgcccataccgcgatctttttccacaaatcggtcagcgcgtaatgatcgacgatagcagtgtcgtgattggtgacgttcgtctggctgatgatgtggggatctggccgctcgttgtgattcgtggagatgtacattatgtacagatcggagcacgcaccaatatccaggatggcagtatgttgcatgtcactcataaatcctcgtacaacccagatggcaacccattaaccattggcgaagatgtcactgttggtcacaaggtgatgctccacggctgcaccattggcaatcgagttttggttgggatgggctcaattttacttgatggcgcaatagtagaagatgatgtgatgattggtgcgggtagtctggtcccacaaaataaacggctggagagcggatatctgtatctcggtagccccgtcaaacagatccgcccgttaagtgatgaagagaaggctgggttacgctattccgcgaataattacgtgaaatggaaggacgaatatctggatcagggtaaccagacccagccttgatcatcttcactttgttcctgaattaagttttccgcttcttcttccaggtcccagcgatgctgacgaaaactcgctaaccactgttctggcgtatctccagtaaagcgatacgccagactctcgccagagatcgcgcatgtcagttgcataccattcacgagagcgggaaaacatacacattttttattctcgtcccactcttccctgtccggaaactggatggcctgattcacgcggacaattcctcctgcaattgctttataactggttctacgtcaggcagaacaccgtgccagagaagaaaggcatgagccgcctgtgccaccagcattcctaaaccatcagcattacgctttgagcctcgctgctcacaccatgccagaaaaggagtttttcctttctgatagaacatgtcatagcaataaatgcctggatgaatgagcgatgacgggatcgccggaatatcaccactgatgccactggatgttgcattaataatgagatcaaactcatgaccttccagttcgtccatactcaacgcctgaatactgccagtgtgcgcaaacaatttagccaactcttccgcgcgggataccgtccgattagttattgtcaccgcacagtccagggaaaggagtggcagtagtacgccgcgagatgctccaccagcgccgataagcagaatacgtaaaccagggcggataaaagacagacgttccagatcgcttaacaagcctacaccatcggtattgtcacccagcaggcgtccatcttctaaccgcatgagggtattaacagcaccagccaacgctgcccgttcagtaagctcatccgctctggcaaaagcctcttctttaaaaggcaccgtcacattcgcacctttaccaccagcactaaagaaagcgttcagtgtgttgatgaaatcattgatgggtgccaacacgcgcccatagggatgttcaatattcagttgctgagcaaattgctgatgaatgaatggcgatttgctgtgggctatcggattaccaaaaacagcataggtttccattatgttacccctgtcgaaacagttcacccgtcagggcatcgcggatttctgaaggatttaaacgcccccccgtttcaccaggcacaaccgggaacgccgcgccaaattgtgcgcgaacttcgtctactgttcgacaaggtggcaatccactcaagttggcactggtagaaaccagcggtttaccataagcctggcacaaagcaaccaccaacggatggtcggtgactcgtacagcaagcgaatcaaagcggcccgtcaaccagcgcggtgttgtcgcaggcgcgggaaagacaaaggtgacaggacctggccagcgggaaaaaatggtttcacgctgcacgtcagtcaacatggtgtcatcaatatagggtttaagctgctcgtaatttgctgcgattaaaatcagccccttatcaaccggacgctgttttaactccaacagtcgcatcactgctgtttcgctatcaggatcgcacccaacaccgaaaacggcttccgttggataggcgatgacacgttcttcattgagaacatctatcgcagctgcgatagcgtctctttgcaggttattattcacgttattattccgccgaaaccggctttccacattgtttactggcacaaaagtgttttacaccctgcgcggttttcttttcgatgagtagcggataatgacactcagggcattctccagctatgggtttgaagttaatggcaaattgacactccgggtagcgatcacaagagtgaaatgttttgccataacgggagcggcgctggaccagatggcccgtccgacattgggggcatgtaattgctgtttcgtccggtttatcgataagttcggtatgttcgcattcagggtagttaatgcaaccaataaacataccaaagcgtccctggcgtaataccagatttgcgccacatgcagggcaaacctgcccctccagaactttgacgatatgtccatccgctgaagatttcagaggacggacgtagtcacacgccggatactgtgagcatccaagaaacggaccgtgtttcccggatcgaataaccagttcagccccgcactttgggcaggactcattattacgcaccgtgaacagtgctgatttcgccataacaacttatgctgaattaaagaaatgattaatgcagcataccttcattcacttcaaagagtaattcttccatttgctggtacgcattttcgcagcccggaatattgaacaacaccatcaggatcacccatttcagatcatccagttcgaactctgcgttatccagcgcgagcactcgctctatcaccatttcacgagtttcaaggttgagcacctgaatctgctcaaggaaaagcagaaacccacggcagctggcatccagtcgttcacactcttccggtgtataaatacgcatggagagaggatccgaggccagttgcatcggttctgccaacccttcctgataatcagcaagtttttccagccatagcagggcattgtagatatcttctcgctcaaaacctgcgtcggtaagatcctgttcaagtttgtcttgatccacacgcaactcagcttctgtgtgaatataggtttcaaacaaatacattagtacgtcgaacatggcatgccctcctcaatcggacatagccgccgggtacagctgcgatccatcctgctaactccagttcgagtagttgagtaactacctctggcacaggttggccggcacgttcagcgacgacgtcaacaggtgttacctcatctcctacgttagccaggagctcaggaaatggcaatgccacgtcttgctgatctggtgaataaaatgaattttcaggggcgtctggcaaccagtgcaatccaaattgcaagttttccagaatttcttccggttccgtcacaagaatcgcaccttgttttattaaccagtgaggcccttcgcttcccggattccctattggacctggcaaggcaaaaacttctcgcccctgctcaagcgcacaacgtgctgtcaccagcgaaccactacgcaaagccgcttccaccaccagtacacctttacttagaccactgataatgcgatttcttcgtgggaaattgtaagcaaggggtggaacatcgaggggaaattccgagacgagagcgcccccctgttcaagcagactggcagccagtcgggcatgacggcggggatgaatggtattaagtccattccccaatacagcaatgctgacgccatttacctgtaaggctgctttatgcgctacaccatcgattccacgcgccagtccactcgtaattgtcactccacgcgtcgccagagtttcgcaaaataatcgtccccatcgctcgccataccatgaatgcgcccgactccccactacggcaagctgaaatgaatgcagcgcgtgcagttctccttcaacaaacagtgcgccggggtaatctgtcgtcgccagaagttgaggaggataaaattcgctgtccgcaggaattaaatgatggttgggttgctccaaccaacaaagtgagctttcgatactctttcgtggaaatgaaagaaagcgttgtgcctgccgcaatgtaagccctgtttgctgcaatacaaccgcatcaatatgcgactgttttgccacccagtgagcgatacggaccatatcatcgccgtacaagctgctgatactcattaaacgcagccaaatttctgtatcgaccatccttatctccctgccataagcagccttagcaatctttgcgattggtcagtgatgctgtcaatcagagggggatttgtctagaatagaagaaataatctttctaactcctgaacacatctctggagatttatgtcagttttgcaagtgttacatattccggacgagcggcttcgcaaagttgctaaaccggtagaagaagtgaatgcagaaattcagcgtatcgtcgatgatatgttcgagacgatgtacgcagaagaaggtattggcctggcggcaacccaggttgatatccatcaacgtatcattgttattgatgtttcggaaaaccgtgacgaacggctagtgttaatcaatccagagcttttagaaaaaagcggcgaaacaggcattgaagaaggttgcctgtcgatccctgaacaacgtgctttagtgccgcgcgcagagaaagttaaaattcgcgcccttgaccgcgacggtaaaccatttgaactggaagcagacggtctgttagccatctgtattcagcatgagatggatcacctggtcggcaaactgtttatggattatctgtcaccgctgaaacaacaacgtattcgtcagaaagttgaaaaactggatcgtctgaaagcccgggcttaaggataagaactaacgtgtcagaatcactacgtattatttttgcgggtacacctgactttgcagcgcgtcatctcgacgcgctgttgtcttctggtcataacgtcgttggcgtgttcacccagccagaccgaccggcaggacgcggtaaaaaactgatgcccagcccggttaaagttctggctgaggaaaaaggtctgcccgtttttcaacctgtttccctgcgtccacaagaaaaccagcaactggtcgccgaactgcaggctgatgttatggtcgtcgtcgcctatggtttaattctgccgaaagcagtgctggagatgccgcgtcttggctgtatcaacgttcatggttcactgctgccacgctggcgcggtgctgcaccaatccaacgctcactatgggcgggtgatgcagaaactggtgtgaccattatgcaaatggatgtcggtttagacaccggtgatatgctctataagctctcctgcccgattactgcagaagataccagtggtacgctgtacgacaagctggcagagcttggcccacaagggcttatcaccacgttgaaacaactggcagacggcacggcgaaaccagaagttcaggacgaaactcttgtcacttacgccgagaagttgagtaaagaagaagcgcgtattgactggtcactttcggcagcacagcttgaacgctgcattcgcgctttcaatccatggccaatgagctggctggaaattgaaggacagccggttaaagtctggaaagcatcggtcattgatacggcaaccaacgctgcaccaggaacgatccttgaagccaacaaacaaggcattcaggttgcgactggtgatggcatcctgaacctgctctcgttacaacctgcgggtaagaaagcgatgagcgcgcaagacctcctgaactctcgtcgggaatggtttgttccgggcaaccgtctggtctgatagtccactcttctaagcccggtcttgccgggcgtttttatacttatgaaaaaacaacgtaatttacgtagcatggcggcccaggccgttgaacaagtcgtcgagcaagggcaatcattaagcaacattctgccaccgctccagcaaaaagtttccgataaagacaaagcacttcttcaagagttgtgctttggcgtactgcgtacgctttcgcagttagactggctgattaataagttaatggcccgtccgatgaccggcaaacagcggaccgtgcattacctgattatggttggtttgtatcaactgctttatacccgcattccacctcatgctgcgctggctgaaacggttgaaggcgctatcgcaattaagcgtccgcaacttaaagggttgataaacggtgtattacgccagttccagcgtcagcaagaagagttattagccgagtttaatgccagtgatgcacgttatctgcatccttcctggttgctgaagcgtctgcaaaaagcgtatccagagcagtggcaatccatcgtcgaagccaataaccagcgtccgccaatgtggctgcgtattaatcgtacgcatcattcccgcgacagctggcttgcattgctggatgaagcaggaatgaaaggtttcccgcatgcggattaccctgatgctgtacgtctggaaacacctgcacctgttcatgcgctacctggttttgaagacggatgggttaccgttcaggatgcatcagcacaaggttgcatgacctggcttgcgccacaaaacggtgaacacattttggatctttgtgccgcccccggcggtaaaacaacgcatatccttgaggtggcaccagaagcgcaggttgttgcggttgatatcgacgaacagcgcctctctcgggtttacgacaatttaaaacgccttggtatgaaggcgaccgtgaaacaaggtgatggccgttacccttctcaatggtgtggcgagcaacagtttgatcgcattttattagatgcgccttgttcagcaaccggtgtgattcgtcgccatccagatattaaatggttacgtcgcgatcgcgatatcccggaactcgcgcaattgcagtctgaaattctcgacgccatttggccgcatttaaaaaccggtggaactctggtctatgccacctgttcggtgttaccggaagagaatagcctgcagattaaagcctttttgcaacgtaccgctgatgccgaactttgcgaaacaggaacaccagagcaaccgggtaaacaaaatctacctggtgccgaagagggcgacggcttcttttacgctaagctaatcaaaaagtgatgagataacgggtcgcgactgatgaaaattatcattctgggtgccggccaggttggcggcacactggcggaaaacctggttggcgagaacaacgatattactgttgtcgataccaacggtgagcgtctgcggaccttacaggataaatttgacctgcgggtcgtgcaggggcatggctctcatccacgcgtattgcgggaagcaggtgccgacgacgccgatatgctggttgctgtaaccagttcagatgaaaccaatatggttgcctgccaggtagcctactcacttttcaacacccctaatcgcatcgctcgtatccgctcaccagactacgtgcgcgatgccgataagctatttcattcagatgctgtgccgattgatcatctgatcgcaccagagcagttggttatcgataatatttaccgactgattgagtatcccggcgcattgcaggtggtgaacttcgctgagggtaaagtcagcctggctgtggttaaagcctattatggcggcccgctgattggtaatgcactttcgaccatgcgcgaacatatgccacatatcgatactcgtgtggcagcaattttccgccacgatcgccccattcgtccgcaaggttcgaccattgttgaagctggtgatgaagtgttctttattgccgcttcacagcatatccgcgcggtgatgagtgaattacagcgactggaaaaaccgtataagcggatcatgctggttggtggcggtaatatcggtgcagggctggcgcgtcgtctggaaaaagattacagcgttaaactcatcgaacgtaatcagcagcgcgctgccgaactggcggaaaagttacagaatacgatcgtcttttttggtgatgcgtcggatcaagaactactggccgaagaacatatcgatcaagttgatctgtttattgccgtcaccaacgatgacgaggccaatatcatgtccgccatgcttgccaaacgtatgggtgcgaaaaaggtgatggtattgatccagcgtcgcgcttatgtggatctggttcaggggagcgttatcgatattgcgatttcaccacaacaagcaactatttctgcgttgcttagccatgtgcgaaaagcagatattgttggtgtttcctcattgcgccgcggcgtagcagaagctattgaagccgttgctcacggtgatgaaagcacctcacgcgttgtcggcagagtcattgacgaaatcaagctaccgccaggaacgattattggagcggtggtacgtggaaacgacgtgatgattgccaatgacaatctgcgcattgagcaaggcgatcacgtaattatgttcctcacagataaaaagtttattaccgacgtcgaaagactcttccagccaagccctttcttcttgtaattaataaggcgtctaatgacgccttattatttccctttgattatcaaggattaattaaattcattcctggcaggaaaatggcttaacatttgttagacttatggttgtcggcttcatagggagaataacatgagcattattaaagaatttcgcgaatttgcgatgcgcgggaacgtggtggatttggcggtgggtgtcattatcggtgcggcattcgggaagattgtctcttcactggttgccgatatcatcatgcctcctctgggcttattaattggcgggatcgattttaaacagtttgctgtcacgctacgcgatgcgcagggggatatccctgctgttgtgatgcattacggtgtcttcattcaaaacgtctttgattttctgattgtggcctttgccatctttatggcgattaagctaatcaacaaactgaatcggaaaaaagaagaaccagcagccgcacctgcaccaactaaagaagaagtattactgacagaaattcgtgatttgctgaaagagcagaataaccgctcttaacaagcgcctgaaagcagaagaccagtggtaaaaaagtgatttactttcttgccactggcctcccagttcccccgattgccatgttttccttttcgcatgtaactgcctttccccttcttatttttctctacgcgctgtcggaataagggatcatgtagtaatgcttctatcgcattatcctttatctgccctttagtatgctgatatcgactcataaaaactccagttggttatttaacggcgcgagtgtaatcctgccagtgcaaaaaatcaacaaccactcttaacgccactcgccccttgttcaagagcttcaagaatcgaacaataaacactgctatgagcagtcccacaacaggcatcgttaaggcgttgcaaggaacgctgcatactctgcaactcggctatccgtgcttcgacttcctgcaatctttcctgcacaatgccttttgactcctgacaggtatggtgttcaggatcgatgcggatcgacagcaactcgcggatcgactccagactgaaacctagttgtctggcatggcggataaatttcaatcgctggagatcgctttcggtatataggcgaaacccaccttcagtacgcacttcatgctccatcatctgctgtttttcgtaataacgaatcgtgtcgggtgttacttccgccatttttgccagctcaccaatgcgatacatacatactccactagttatcgttgattttgtccaacaacttgtcagcataatcgccgcgtaaaaaatcggtactcaatccagcttgtcgcagcttcaattccagtaatgacaatcgacggctaacctcttgatattgcggatcatcgtgacggatacctttgagaatatccagaagctgaattgcttctctccgttgctcaagttctggcggtaagcaaccggcattcttcagcaagcgataccccgcacgtaattccggtggcacgtgagaatcatcatccagtatcaatggttcgccgctacctgccaggttatcaaactcacctttcgcttgcgcttctgctatatggcgctctgcccactggtcaagtaaccacataaatactccaggggatgaacaaaaagagtacagctattgtagataagtggggatactacgggtataaaaaaacccgccggggcgggtttttttacgttgcttcagattactctgcagcagcttctgctttctctgaacgatcaaccagctcgatgtaagccatcggcgcgttgtcgcctgcacggaagccacacttcagaatacgagtgtaaccaccggcacggctcgcgaaacgcgggcccagttcgttaaacagttttgccacgatctcgttatcacgagtacgggcgaatgccagacgacgattagcaacgctatcagtcttggcaagagtaatcagcggctcaactacgcggcgcagctctttcgctttaggcagagtcgtcttgatgatttcatgacgaaccagtgaacctgccatattgcggaacatagcctggcgatggctgctgttgcggttcagttgacgaccactcttacgatggcgcatgaccttatccttctcagtaaaaccttaacctgtgatccggttactcgtcagcgatgcttgccggtggccagttttccaggcgcatgcccagagacagtccacgggaagccagcacgtctttaatctcagtaagagattttttaccaaggttaggcgttttaaggagctcaacctcggtacgctgtaccagatcaccgatatagtggatagcttctgctttaaggcagttagcagagcggacagtcaattccagatcgtcaacagggcgcagcaggatcggatcgaactctggtttctcttctttcacttcaggctgacgtacatcacgtaagtcaacgaaagcttccagttgttcagccagaatggttgccgcacgacgaatcgcctcttcaggatcgattgtgccgttggtttccatttcgatgaccagcttgtccaggtcggtacgctgttctacacgcgctgcttcaacattgtaggcaatacgctccacagggctgtagcatgcgtcgaccagcagacggccgattgggcgctcatcttcttccgaatgaattcgggtagaagccggcacataaccacgaccgcgctgaactttgatacgcatgctaatagacgcgttctcatcggtcaggtggcagatcacgtgctgcggcttgacgatttcgacatcaccgtcgtgggtgatatcggctgcagtcacagggccaatgccagatttattcaaggtaagaataacttcatctttgccctgaactctcaccgccagccctttcaggttgagcaggatttccaggatatcttcctgaacgccttctttggtgctgtactcatgtagtacaccatcaatctcaacctcggtcaccgcgcaacccggcatcgatgagagcagaatacggcgcagtgcgttacccagagtatggccaaagccacgctctaaaggctcaagggtcaccttggcgtgcgtcgaactcacttgctcgatatcaaccaggcgcggttttagaaactctgtcacagaaccctgcattgtgtcctctctttggtactaagctttacttggagtaaagctcgacgatcaggtgttcgttaatgtccgcagacagatcagaacgctccggcttacgcttaaacgtaccttccatcttgccagcatcaacttccagccaggttggcttttcacgctgctcagccagctccagagcggctttcacgcgagactgcttcttcgctttctcacgaatgcttacaacgtcattcggactaacctgataagaagcgatgttaacaacacgaccgtttaccataattgctttatggctaaccagctgacgtgcttctgcacgagtggcaccgaagcccatacggtatacaacgttgtccagacgaccttccagcagagccaacaggttttcaccggtgttgcctttcagacgtgctgcttctttgtagtagttacggaactgacgctccagcacaccatagatacggcgaactttttgcttttcacgcaactgcacaccatagtcagacagacgcggtttacgcgcaccgtgctggccaggagcttgttcaattttacacttggtatcgatcgcgcgaacgccagacttaaggaataagtcggtgccctcacgacggctcagcttgagcttaggacccaaatatcttgccattttctttctccaacaaacctggaaaacgaggcgttatacgcgacgttttttcggcggacgacaaccgttatgagggatcggagtcacatcagtaatgttagtgatgcggaaacctgcggcgttcagagcacgaatagtagattcgcggcctggacccggacctttaaccataacttccagattcttgatgccgtattctttcacggcgtcagcgcaacgctctgctgcaacctgagctgcaaacggagtggatttgcgagaaccacggaaaccggaaccaccggctgttgcccaacccaacgcgttaccctgacgatcagtgatagtcacgatggtgttgttgaaagaagcatggatatgagccacgccgtcagagacttgttttcttacacgtttacgtgcacgaattggtgcctttgccattattcaatcaccccgattatttcttgatcggtttgcgcggacccttacgggtacgtgcgttggtcttggtacgctgaccgcgaaccgggagaccacgacgatgacgcaaaccgcgatagcaaccaagatccatcaggcgcttgatgctcatgctgatttcacggcgcagatcaccttcaacgacaaatttggcaacttcgtcacgcagcgtgtcgatttgtccttcagacagctcactgatcttaacatcttcagcgatacccgctgcagccaggatggctttagaacgggtcttgccgacgccataaatcgaagttaatgcgattacggcatgcttatgatcaggaatgttaatgcctgctatacgggccactatgcactcctactatttaatatgtacgttccatgctgaaaagcccgttttcaggatactcaaatggaaacgcacagacatacaaaagattggctggctaatctagccagctcaacccaactttgcaagaaaaatatgcgaaaaaatcagccttggcgctgtttatgcttcggctcggcactgcaaatcacacggatgacaccatcacgcttaacgattttgcagttacggcataatttcttgacggaagcacgaactttcatttttactctccgtaacttctcgggcgaccaattatcggccgtagcctttcaggttcgccttcttcaatgcagactcatactgactggacatcatcagagtttgcacttgagccataaagtccataatcacgacaacaacgataagcagtgaggtcccaccgaagtagaacggtactttcattgcatcacgcatgaactccgggatcaggcagataaaggtaatatacagcgcaccaaccagggtcaggcgggtcattactttatcgatatacttcgccgtttgctctcccggacgaattcctggtacaaatgcaccggacttcttcaggttatctgctgtttcacgcgggttgaaaaccaacgccgtgtagaagaaacagaagaagatgattgcagacgcatagagtaacacataaagcggttgcccaggctgcaaatacagcgaaattgttgtcagccagttccaaccagtaccgcccccgaaccatgacgcgatggtcgccgggaacagaataatactggaagcgaagattgccgggattacccccgccatattcactttcagcggtaaatgtgtgctctgtgcagcatagacacgacgaccttgctgacgtttcgcgtagtttaccacaatgcggcgttgaccacgctcaacaaatacaacaaagaacgtcactgcaaatactaatactgcaaccaacagcaacacgaggaagtgcaggtcgccttgacgcgcttgctcgatagtatgggcaatggctggcgggagtcccgcgacaataccggcgaagataatgattgaaataccgttgccgatacctcgttcagtaatctgttcgcccaaccacatcaggaacatggttcctgtgaccagacttacaacagcggtgaagtagaatgcaaagcccgggttaatcaccaggccttgcataccaggcatattcggcagaccggtagcaataccgatcgactggaatattgccagcaccagagtaccgtagcgggtgtactggctgatcttacgacgaccagactccccttctttcttaatttctgccaacgttgggtgaaccaccgtcagcagctggataatgatcgacgccgaaatatacggcatgatccccagagcaaagatagaagcacggctgagagcaccaccagagaacatgttaaacatctcaatgatggtgcctcgctgttgctcaagcagtttggcaagtacagcggcatcaataccagggatcggaataaaagagccaatacggaacacaatcagcgcaccgataacaaacagcagtctgcgtttcagctcgcctaagccacctttggcactttgaaaatctaatcccggttgtttagccatctgctacttattcctcgattttaccgccagcagcttcgatagcagcacgagcgcctttagtaacacgcaggccacgaacagttaccggagtcgttacttcgccagccaggatcactttcgcgaactcgatctggataccgataatgttagccgctttcagcgtgttcaggtctactacaccgccttctactttagccaggtcagacagacgaatttcggctgtaatcgctgctttacgagaagtgaagccgaatttcggcagacgacggtacagaggcatctgaccaccctcgaaaccgcgacgtacgccaccgccagaacgagacttctgacctttgtgaccacgaccaccggttttaccgaggccagaaccgataccacgacccaggcgtttacccgcctttttggagccttcggccggagacagagtatttaaacgcatctcttactcctcaactttaaccatgaaggaaaccgcgttgatcataccgcgaatagcaggagtatcctcgcgctctacggtgtgaccaatacgacgcagacccaggccaagcagcgttgccttgtgtttcggcagacgaccgattgcactgcgggtttgagtaattttaatagtctttgccatggtttatttccccagaatttcttcaacggatttaccacgcttggcagcgaccatttctggagaattcatattttccaggccatcaatagttgcacgaaccacgttgatcgggttggtggaaccataggctttagccagaacgttatgaaccccagcgacttccagaacggcgcgcattgcaccaccggcgatgataccggtaccttcggaagccggctgcatgaatacgcgagaacccgtgtgaacacctttaacagggtgttgcagagtgccgttattcagcgcgacgttaatcatattgcgacgggctttttccatcgctttctggatcgctgctggaacttcacgcgctttaccgtaaccaaaaccaacgcgaccgttaccatcgccaactacagtcagagctgtgaaggagaaaatacgaccacctttaacggttttagatacgcggtttaccgcgatcagcttttcctgcagttcgccagcttgtttttcgatgtgagccatcttacacctctaccttagaactgaaggccagcttcacgggcagcatctgccagtgcctggacacgaccatgatattggaacccggaacggtcaaaggatacatctttgatgcctttttccagagcgcgttcagcgacagctttacccacagctgcagccgcgtctttgttaccggtgtacttcagttgttcagcgatagctttttctacagtagaagcagctaccagaacttcagaaccgttcggtgcaattacctgtgcgtaaatgtgacgcggggtacgatgtaccaccaggcgagttgcgcccagctcctggagcttgcggcgtgcgcgggtcgcacgacggatacgagcagatttcttatccatagtgttaccttacttcttcttagcctctttggtacgcacgacttcgtcggcgtaacgaacacccttgcctttataaggctcaggacgacggtaggcgcgcagatccgctgcaacctggccgatcacctgcttatcagcgcctttcagcacgatttcagtctgagtcggacattcagcagtgatacccgcaggcagctgatggtcaacaggatgagagaaacccagagacaggttaatcacattgcctttaaccgctgcacggtaacctacaccaaccagctgcagcttcttagtgaagccttcggtaacaccgataaccattgagttcagcagggcacgcgcggtaccagcctgtgcccaaccgtctgcgtaaccatcacgcggaccgaaggtcagggtattatctgcatgtttaacttcaacagcatcgttgagagtacgagtcagctcgccgtttttacctttgatcgtaataacctgaccgttgatttttacgtcaacgccggcaggaacaacgaccggtgctttagcaacacgagacattttttcctccgattaggctacgtagcagataatttcgccaccaagaccagcctggcgcgctgcacgatcagtcataacacctttagaggtagaaacaactgcgatacccagacccgccataactttcggcagctcatctttacgtttatagatgcgcagacctgggcggctgacacgctgaatgctttctacaacagctttgccctggaaatacttcagagtaagttccagttcaggcttggtgtcgccttcaactttaaaatcttcaataaaaccttcttccttcagcacgttggcgattgccactttcagcttggaggaaggcatggtgaccgcagctttgttcgcggcctgaccgttacggatacgggtcagcatatccgcgatcggatcttgcatgctcatctgtctttactcccgtgattcaattggtgacaattaccagctagcctttttcagacccgggatttcaccgcgcatagcggcttcacggaccttaatacggctcaacccgaacttccgcaggaaaccatgcggacgacctgtttgacggcagcggttacgctgacgagacgggctggaatcacgcggcagagtctgcagcttgagaacagcgttccaacgatcttcgtcggaagcgttcacatcagagatgatcgctttcagttcagcgcgtttcgcgaagtatttatcagctaaagctacgcgttttacttcgcgtgctttcattgattgcttagccatttagtaaccctaccttacttgcggaacgggaagtcaaaggcagccagcagagcgcggccttcttcgtcagatttcgcagtagtggtaatggtaatatccaaaccacgaacgcggtcgactttatcgtagtcgatttctgggaagatgatctgctcacggacacccatgctgtagttaccacgaccgtcgaaagacttagcggacaggccacggaagtcacggatacgaggtacagcaatagtgatcaggcgctcaaagaactcccacatgcgttcgccacgcagagttactttacagccgatcggatagccctgacggattttgaagcctgcaacagatttgcgtgctttggtgatcagcggtttttgaccggagattgctgccaggtctgctgctgcgttatccagcagttttttgtcagcgatcgcttcaccaacacccatgttcagggtgatcttctcgacccgagggacttgcatgacagaattgtagttaaactcagtcatgagttttttaactacttcgtctttgtagtaatcatgcagtttcgccatcgtactactccaaattacttgatagtttcgctgttagacttgaagaaacggacttttttaccgtcttcgaatctaaagcctacacggtcagccttgccggttgccgcattgaagattgctacgttggaaacctgaatagcggcttctttttcaacgatgccacccggttggttcagggccggaaccggcttctgatgtttcttaaccaggttgataccttcaacaatgaccttgccggaagacaggacattcttaactttaccgcgtttacctttatctttaccggttaacacgataacttcgtcatcacgacggattttcgctgccatgattcgctccttagagtacttctggtgccagagagataattttcatgaacttctcactacgaagctcacgagttaccggcccaaaaatacgcgtaccgataggctgctcgctgttgttgttcagaagaacacaagcattaccatcgaagcgaatgacagaaccgtccgggcgacgaacacccttcttggtgcgcaccactaccgccttcagcacatcaccttttttgaccttaccacgcggaattgcttctttgatggtgatcttgatgatgtcgcctacgcctgcgtagcgacggtgcgagccacccagaaccttgatacacattacgcgacgtgcaccggagttgtcggcgacgttcagcatagtctgttcttggatcattttagtgctccgctaatgtcaactactactgagacccgaaaatcaggtcgttaaaaatccccatatcgagggcgcggcattataacaccgcttcaaggatatgggtagaaaaaataaacggctcatttctgagccgtttattcgtattgagagagtgtactgtattacagaaccgctttctctacaacgcgaaccagcgtccaggatttagtcttggacagcggacggcattcgcggatttcaaccacgtcaccgataccgcattcgttgttctcgtcatgtacgtgcagtttggtcgtacgcttgatgaatttaccgtagatcgggtgtttcacaaaacgttcgatagcaacaacaatggatttctccattttgtcgctaacaacgcgaccttgcagagtacggattttatcggtcattacgcacccgccttctcgttcagtaaagtcttaacgcgtgcgacatcgcgacgcacttgcttcaacaggtgagactgttgcagctggccacttgcagcctgcatacgcaggttgaactgctcacgcagcaggttcagcagctcggtgttcagctcttcaacgctcttctcacgcagctcttttgctttcattacatcaccgtcttagttacaaaggtggttttaatcggcagtttcgctgctgccagcttgaatgcttcacgggccagctcttccggaacaccgtccatttcatacaggactttacccggctgaatcaaggcaacccaatactccacgttacctttacctttacccatacgcactgccagcggcttttcagtgatcggtttgtccgggaacacacggatccagatcttaccttgacgcttaactgcacgggtcatagcacgacgtgctgcttcgatctgacgggcagtcagacgaccacggccaacagctttcagaccgaagctgccgaagctaacatccgtaccctgcgccagaccgcggttacggcctttgtgcattttacggaattttgtacgctttggttgtaacatcagcgacgctccttatttacggcctttacgctgctgctttttaggctgagcagccggtttttccggttgttcaacagcagccataccacccaggatctcgcctttgaagatccacactttaacgccgattacaccgtaagtggtgtgcgcttcagaggtgttgtagtcgatgtcagcacgcagagtgtgcagcggtacgcgaccttcgcggtaccattcggtacgtgcgatttccgcgccgcccagacggccgctaacttcaactttaatacctttagcgcccagacgcattgcgttctgtacagcacgcttcatagcacgacggaacataacgcgacgttccagctgagaagtgatgctgtcagcaaccagttttgcgtccagttcaggcttacgaacttcggcgatgttgatctgtgcaggaacgccagcgatgtccgctacgaccttacgcagtttttctacgtcttcaccttttttaccgataacgatacccgggcgagcagtgtgaatggttacacggatgctcttagccggacgctcgataacgatacgagatacggacgctttagccagttccttagtcaggtactgacgtactttaaaatcactgtccaggttgtcagcgaattctttggtgttcgcaaaccaggtagagttccatggttttacaatacccaggcgaataccattaggatgtactttctgacccattgctagtctccagagtctcagcgatcggacacaaccacagtgatgtggctggtgcgcttcaggatgcgatctgcacgaccttttgcacgcggcataatgcgcttcatgctcgggccttcgtctacgaaaattttcgtaactttcagatcgtcaatgtcagcgccatcgttgtgttcagcgttagcaatggcagattccagaactttcttgaccagtacagccgctttcttgttggtgtaggtcaaaatatccagagcctgcgacactttcttaccgcgaatcaggtcagcaacaaggcgaaccttctgagcagaagaacgagcatggcgatgtttagcgatagtttccatctcttcctcctaccttatttcttcttcgcttttttatcagcagcgtggccgcgataagtacgagtcggtgcgaattcacccagtttgtgaccaaccatttcgtcggttacaaataccggaacgtgctgacgaccattatggacagcgatggtcaaaccgatcatgttaggaaagatcgttgaacgacgggaccaagtgcgcaggggcttcttgtctccgctttccaccgctttctctaccttcttcagcaagtgcaggtcaataaaaggacctttcttgagagaacgtggcatggcttatcctctaaaattatttgctacggcgacgtacgatgaatttatcagtacgcttgttgctgcgggtcttcttacctttggtctgaacgccccacggagttaccgggtgcttaccaaagttacgaccttcaccaccaccatgtgggtggtctaccgggttcatcgcggtaccgcgaacggtcggacgaacaccacgccagcgtgcagcacctgctttacccagaacgcgcagcatatgctcagcattgccaacttcgcccagagttgcacggcagtctgcttctactttacgcatttcaccagaacgcagacgcagggtgacataagcaccatcacgagcaacgatctgaacgtaagtaccagcggaacgtgccagctgaccgcctttacctggtttcatttctacgttatgaacagtagaaccaaccgggatgttgcgcatcggcagggtgttacctggtttgattgcagcatcaacgccagactgaatctggtcgccagctttcaggcctttaggggccaggatgtaacggcgttcaccgtctttgtacagaaccagcgcgatgttcgcggaacggttcggatcgtactcaagacgttcaacaactgccgggataccgtctttgttgcgtttgaagtcaacaatacggtaagcctgcttgtggccaccaccgatatgacgagtggtgatacggccattgttgttacgaccaccggatttgctgtttttttccagcaacggagcaaaaggtttgcccttgtgcagctcagggttaaccactttaactacgtggcgacgacccggagatgtcggtttacatttaacaactgccattgtattactcctccgacttactcagcgccgccaacgaagtccagattctggccttctttcagggtgacgtaagcttttttccagtcgctacgacgaccgatacgctgtccgtgacgtttaactttccctttaactaccagggtgttaacgacttcgacttcgacttcaaacagtttctgcacagcagctttgatttctgctttggtcgcgtctttagcaactttgagtacgatggtgttggatttttccatcgcagtagacgctttttcagaaacgtgcggtgcacgcagcaccttcagcagacgttcttcacgaatcatgccagcatctcctcaacttgcttaacagcatcagcagtcattacgactttgtcgaaggcgatcaggctaaccgggtcgataccagttgcatcgcgtacgtcaaccttgtgcaggttgcgcgcagccaggaacaggttttcgtccagctcaccggtgatgatcagcacatcttccagagccatgtctttcagtttctgtgccagcagcttagttttcggcgcttctacagagaacttctcgacaacgatcagacgatcctgacgtaccagttcggacaggatgcttttcagcgcgccgcggtacatcttcttgttaactttttgactgtggtcctgcggacgagcagcaaaggtcacgccaccagaacgccagatcgggctcttgatagaaccagaacgcgcacggccggtgcctttctggcgccacggttttttaccggaaccagttacttcagcacgagtcttctgagcacgagtaccctgacgagcaccagctgcataagcaacaacaacctggtgaaccagcgcttcgttgaaatcacgaccgaaggtagtttcggaaacagtcagcgcgctctgcgcgtctttcaatactaattccattgctatctccttacgccttcacagctggtttaacgatcaggtcgctaccggttgcacccgggacagcacctttaaccagcagcaggttgcgctcagcgtcaacgcgtactacgtcaaggctctgaacggttacacgttcgttacccatctgacctgccattttcttgcctttgaacactttgcccggagtctggttctgaccgatagaacccggaacgcggtgagacaaggagttaccgtgagtagcgtcctgggtacggaagttccagcgcttaacggtacctgcgaaacctttacctttagaggtgccagttacgtcaacttttttaacgtcagcaaacagttcaacgctaatgctctgacctacagtgaactcttcgccttcagccaggcggaattcccacagaccacggccagcttctacgccagctttagcgaagtggccagcttcaggcttggtcacacggttagcttttttagcaccggtggtcacctgaatagcacggtagccatcgttagccaggtctttaacctgagtaacgcggtttgcttcaacttcgattacggttactgggatagaaacgccgtcttctgtgaagatacgggtcatacccacttttttaccgactaaaccaatcattgtttcaacctctcaatcgctcaatgacctgattaacccaggctgatctgcacgtctacaccggcagccagatccagacgcatcagagcatcaacggttttctcggttggctcaacgatgtcaaccagacgcaagtgagtacggatttcgtactgatcgcgcgcgtctttgttgacgtgcggggagatcagaacagtgaagcgctctttgcgtgtcggcagcgggatcggaccacggacctgcgcaccagtgcgcttggcagtctcgacgatttccgcggttgcttgatcgatcagacgatgatcaaacgctttcaggcggatacggattctttggttctgcatgagaccagagctccaattattttataaacgaaaatgattactcctcagacccattacgattgatgggagagtgtaaccgttcttacgtagctccccgattgggagcattgttaggtagccaaattcggctaactgaggttcagattgaacctgctgtcaactacgacaagcccgcgcattatacatacttaaccaccgaacgcaagcgtattgctagtaaagtaaacagccttcgggttatctctcaagttcgttcagtgcatttttgacacgctctcttaaaccggctttctcttcgctttcttccacagtattttcttcgtcttcagaagaagagggggcattctcaaccgcgacgcctgggtcatcttcctcctcgacggattcgacgacggggagtggctgttttttgaagaaatagtgttgtgttgattgtttaaaagcgggcgtttcagcctctacagtgacttcggcttttactatccaaagcacccatagctgcctggcatacccaccaaccagcaccattcctgcaaaccacaggcaaatcagtaataaacaaattacatatattatggtgctgtgtttttgtcgggagaagataccagggtgacctgtttctttctgctcacgcgcggcgatatagaattcaaacatgtcatttccccttcactgttgtttccggggaaatatttgcttcatcccgatataagtaggcactctcccctgccacctgccagagatgtactaacgttgaaaagccaacaacaccgtcagttttcaagtggtggcttttttgaaattgctttattttttctaccaacaagggacgccactccgccgaaggttctgtcgaaatatgcaatgcgcggtttaacatcgtttccagccagagaatctcttcctcgctgctatcacgcgtaatggtactctccccttccggcgacattttccacaacagaagataatcacccgtccataccgactcaaaccatttatgtgtcagcgtccacgtttgctgacctacgaggacatcaacgctagcctcaccgacgcgaacgaccacaacaggcaattttttgtccccgactttaagcgatgcgatccagggcaaattctgatctaccaatgtttgtaaagaagcattcccacttttacatgccagccccgctcttactgcctgatcgcaccaggccgaatcagctgggacctcgtacccccatacgccgtataacacgcttagcgcctcactatcgcgcatcaccacatgagcaatatccttagtcatatcttgtttaactactggcgttacgggtatcagccacgcaggaacgggtaacgtagctgtaaaagaggacagcagtagccaaccacaggtaagagcgataatggttccactcatcaccacggcaagctgcattttccgggggcggttatcacccaatatgcggtaaatcattcgccattgttttgctgtgaaaacgctggtctgctcggcttgctgtaataagcgaattgtttcgccggcaagcgccagctttctgcgatcgccccgacataataaagctatccgtttcagaactctggcggttaaaaggagatcgggttggtcaatattctgaccttcaaggatgcttgccttaagttcgtgctccgtcagacgtcctatcgagacaagttcaatgccctgttttttaaaatcacgttcgacttttcgatcgggtctgccgatcagcaaaaattgaccgtcaggaataagagatattgcgcgttggagatcatcaagtatgcggcggtgattcaggtgagcattttcaataataataagagggcagcgactatcagttcgatgaagcgcatgcagtaattgccccgccatctcatctcgcgtccaggcgctgtcacggcagccctgttcagccgcgttatcgtcggtaacgatccatgcggccttaccttgccaggaaacaacgaggcttaaagtaatcacacggcgatgtttatctttttgcagttgctgcgccagccaggtttttccacttccagcctcacccaacaaatagcatagacgccaggtttgacgtttctcacacaaccaggaaagaataacttctcttctcgtagacatagaacttcctgttttaattattgattatccttaatcataaaaataatgtatgtatttattaattaaatacatattactaatataaataaattttgcttgattcatgcaagcggcattaatactatttatactaacgtcaatatacaacccacccaatctattttattagaacatacatcgtgcccacactacgtttccccttccatctggcgaatcataataaagatgctgccatcaatatattgattatatttataagcatagggtcgattatttttaatgtgaattatttccatacaactatagttaaaaatggacagatcattaatcaaccaacaaacgcatttcagtctgatttcagccttgccgctttatggcgtaacgaaaatcatgctggggtaaaagatgcaaatcccgtggcagttaatcaggaaacacctaagctctctatagcgcttaatggcattgtactcacatcgaatgatgagacttcttttgtcttaattaatgaggggagcgaacaaaagcgatactccctcaacgaagcccttgagtcagcgccgggaacgtttattagaaaaataaataaaaccagcgttgtgtttgaaactcacgggcattacgaaaaagtaactctccatccagggctacctgacatcatcaagcagcctgattcagaaagtcaaaatgtactcgctgattatattatcgccacgcctatacgtgatggagaacagatatacgggcttcgattgaaccctcgtaagggcctcaatgcatttaccaccagcttgctacaaccaggggatatcgccctcaggatcaataatctttcgctgacccaccctgatgaggtttcacaggcattaagtttactgctaactcaacaaagtgctcagtttacaattcgtcgcaacggcgtaccccgcttgataaatgtttccgtcggggaacttacaggaatgaatggactgcgtcatgaaaggactcaataaaatcacctgctgcttgctggcagcactactcatgccttgtgcaggacacgctgagaacgaacaatacggcgcgaacttcaataacgccgatatccgccagttcgtggaaatagtgggtcagcatcttggcaaaacgatcctgatcgacccttcggtacagggaaccatttccgtacgcagtaatgatacgtttagccaacaggagtactaccagttctttttaagtattcttgatctttacggttattccgtgatcacgctggacaatggttttctgaaagtggttcgctcagctaatgtaaaaacatcgccagggatgattgctgacagttctcgtccaggcgtaggtgatgagttggtcacccgaattgtaccgcttgagaacgttcctgctcgtgacctggcccccctgctccgccagatgatggatgcgggtagcgtcggtaatgttgtgcattatgaaccctccaacgttcttattctgaccggtcgtgcctccaccattaataaactgattgaagtcataaagcgcgttgatgtcatcggcacagagaagcagcaaattattcatctggaatatgcgtcagcggaagatctcgccgagattcttaatcaattaatcagcgaaagccacggtaaaagccagatgccagccctcctctccgcgaagattgtggcggataagcgaaccaactctcttatcatcagtggaccggaaaaagcacgccagcgcatcacttcattactgaaaagccttgatgtcgaagagagcgaggaaggaaatacccgggtttattacctgaaatatgctaaagccacgaatctggtggaagtgctaaccggtgtttccgaaaagctgaaagatgaaaaagggaatgcgcgtaagccctcctcttctggcgcgatggataacgtcgccattaccgccgatgaacagactaactctctggtcattaccgctgaccagtccgtccaggaaaaactcgccacggtaattgcgcgtctggacattcgccgtgcacaggtgctggttgaggcaatcatcgttgaagttcaggatggaaatggactaaacctcggcgtgcaatgggcgaataaaaacgttggcgcacagcaatttaccaataccggattaccgatttttaacgctgcgcaaggtgtggctgattataaaaagaatggtgggatcaccagcgcgaatcctgcctgggatatgtttagcgcctacaatggcatggccgcaggcttcttcaatggcgactggggagtactgcttaccgcgctggccagtaacaataaaaatgacatcctcgccaccccaagcatcgtaacgctggataataaactcgcgtccttcaacgtggggcaggatgtgccggtgctatccgggtcacagaccacttcaggggataacgtctttaataccgtcgaacgcaaaacggtggggacaaaactcaaagttactccgcaggtcaatgaaggcgacgcggtgttgctcgaaatagagcaggaagtctccagcgttgactcttcctctaactcgacgctcggcccgacgtttaatacccgtactattcaaaacgccgtgctggtcaaaaccggtgaaacggtggtcctgggcggattgctggatgatttttctaaagagcaagtgtcaaaggttcctctgcttggcgatattcctttagtggggcaactcttccgctatacctccaccgagcgcgctaaacgcaacctgatggtatttatccgtccgacgattatccgtgacgatgatgtttatcgctcactgtcaaaagagaaatacacccgttaccgtcaggagcaacaacagcggatcgacgggaaatcaaaagcgctggttggctcggaagatttgccggtgctggatgaaaacacgttcaacagtcacgcccctgcgccatcgtcacggtgaggcattcatatgagaattcactcaccgtaccccgccagttgggcgctggcacaacgaattggttatctctattcagagggcgagattatttatctcgccgatacgccattcgagcggttactcgatattcaacgtcaggttggccagtgccagaccatgaccagcttgtcacaggctgattttgaagctcggctggaagcggtattccatcagaataccggtgagtcgcaacagattgcgcaggatatcgatcaatccgtcgatcttctctcgctttcggaagagatgcccgcaaatgaagatctcctgaatgaagattcagcggcaccggttatccgcttgatcaatgcgattttgagtgaggccatcaaagaaaccgcctctgatatccacattgaaacctatgaaaaaacaatgtcgatccgttttcgcatcgacggcgttttgcggacaattttacagccaaacaaaaaactggcggcactgcttatctcccgaattaaggtcatggctcgtcttgatatcgccgaaaaacgtattccacaggatggaagaattagtttgcgtatcgggcgacgtaacatagatgtccgcgtatccacactgccgtccatctatggtgaacgcgccgtactccgcctgctggataaaaacagcctccagctttcattgaacaacctggggatgacggcagcggataagcaggatttagaaaatctcattcagcttccgcacggtattatcctggtgacagggccgacaggctccggtaaaagcaccacgctctacgccatcctttcggcgctgaatactcccggccgcaatattctgacggtagaagatcccgtggaatatgagctggaaggcattgggcaaacgcaggtgaatacccgtgtggatatgtctttcgctcgcggcctgcgcgccatacttcgccaggacccggatgtcgtcatggtgggggaaattcgtgatacagaaaccgcgcagattgcggttcaggcctcgctcaccggccatctggtactctcaacactccacactaacagtgcatcaggcgcagtgacccggctccgcgacatgggcgtcgaatcattcctgctttcgtcttccctggcagggattatcgcgcaacgtctggttcgtcgcctgtgtccgcaatgccgacaattcacgcccgtatcaccccaacaagcgcagatgtttaaatatcatcagctcgcggtgacaacaattggcactcccgtaggctgccctcattgccatcaatccggctatcaggggcgcatggcgatccacgaaatgatggtggtgacgccggaattacgggccgctattcatgaaaatgtggatgaacaagcactggagcgactagtccggcaacaacacaaggccttaatcaaaaatggcctgcaaaaagtgataagcggtgacacctcctgggatgaggttatgcgcgtcgccagtgccacgctggagagcgaagcatgaattatcgctatcgcgccatgacccaggatggtcaaaaattgcaagggatcattgatgctaacgatgaacgtcaggcacgactgcggctgcgtgaagaagggcttttcctgctggatattcgcccccaaaaaagttcgggagtaaaaacacgtcgcccgaggatcagccatagtgaactgacgcttttcacccggcagttggcaaccttaagcgcagcggcattacccctggaagagagccttgccgtaatcggtcaacaaagcagtaataaacgactgggtgacgtgttaaatcaggtacgcagcgccatccttgaagggcatcccctttccgatgcattacagcattttcccacgcttttcgattcgctctatcgtaccctggtaaaagcgggcgaaaagagcgggctgctggccccggtgttggaaaagctggctgattacaatgaaaaccggcagaaaatccgcagcaagctcattcagtcactgatctacccctgtatgctcactacggtggcgattggggtcgtgattattctcctcactgctgtcgtgcccaaaattaccgaacagttcgtgcatatgaagcagcaactgccgctgagtacacgcattcttttaggtctgagcgacacgttgcaacgtaccggcccgacattattagcgacagtgtttattgtcgctgtaggtttctggctctggttaaaacgcggcaataaccgccaccgttttcatgccatgttgctgcgcgttgcgctcatcggcccgctgatttgcgccattaacagcgcacgctatctccgcactttaagtattttgcaatccagcggcgtccctctgctggatgggatgaatttgtccaccgaaagcctcaacaacctcgaaattcgccagcgtctggcaaatgcggcagagaacgttcgccagggtaacagcattcatctttcgctggaacaaaccgcaattttcccgccgatgatgctctacatggtggcctctggcgaaaaaagcgggcagctcggcacattaatggtcagagccgcagataaccaggagacactccaacaaaatcggatcgccttaacgctctccatcttcgagccagcactcattattacgatggcactgatcgtcctgtttattgtcgtgtcggtactccaacctcttcttcaacttaactcaatgattaattaaggaaagcatatgcgcgcaacggataagcaacgcggttttacattactggaaattatggtggtgatcgtcattatcggcgtacttgccagcctggtggttcctaacctaatgggcaataaagaaaaggcggataagcaaaaagccgtcagcgatattgtggcgctggaaaacgcccttgatatgtacaaactcgacaatcatcactatccaaccacaaatcaggggcttgaatccttagtagaagcgccgacactgccaccgctggccgcaaactataacaaggaaggttatatcaagcgtctgcctgccgatccctggggcaatgattatgtcctcgttaatcctggtgaacatggtgcatacgatctgctttcagcagggcccgatggtgaaatgggaaccgaggacgacatcaccaactggggtttgagcaagaagaaaaagtaagtcagcgatgaatcagcaacgcgggtttaccctgctggagatgatgctggtgctggcgctggtcgctatcacggcaagcgtggtgctcttcacatatggccgggaggatgtcgccagcactcgtgcgcgcgaaacagcggcgcggtttaccgctgcacttgaattagccatcgaccgcgccacgctcagtggtcagcctgtcggtatccatttctctgattcagcatggcgcattatggtaccgggcaaaacaccatcagcctggcgctgggttccattacaagaagatgccgcagacgagagccaaaatgactgggatgaagaactctcaattcatcttcagccatttaaacctgatgacagcaaccagccacaggttgtgattctggccgacggacaaatcacgcccttctctttgttgatggctaacgccgggaccggtgagccgctcctgacgttagtctgttcaggctcatggcccctggatcaaacgctcgccagagatacccgcccatgaacaaacaatcagggatgacactgcttgaagtcttactggcgatgagtattttcaccgctgttgctctgactttaatgagcagtatgcaagggcaacgaaatgccatcgagcgaatgcgtaacgagacgctggcattgtggatagcggataaccagcttcagtcacaagattcattcggcgaggaaaacacgtccagttctggcaaagagttaataaatggcgaagagtggaactggcgcagcgatatccactcaagcaaagacggcacgcttctggaacgcaccataacggtgacattacccagcggtcagacaacctcgcttacgcgttatcaaagcatcgataataaatccgggcaggcacaagatgattaatcgccagcagggtttcacattgctggaggtcatggcggcgctggcgattttctcaatgcttagcgtgctggcgtttatgattttttcgcaagcttccgagttgcatcaacgctcacagaaagaaatccagcagttcaatcagctacagcgcaccatcaccattcttgataacgatctcctgcaactggtcgcccggaggaatcggagtacggacaaaatcatggtgttgggtgaagaagctatttttaccacgcaaagtcgcgatccgctggctcctctcagtgaagcacaaaccttactcactgttcactggtatctgcgaaatcatacgctctaccgtgctgttcgtacttctgtggatggcaggaaggatcaacccgcccaggcgatgctggaacatgtcgagagctttcttctggaaagtaacagcggggaaagccaggaacttcctctctcagtcacgttacatctgcagactcagcaatatggggggttacagcgccgttttgcattacctgagcagttagcgagagaagagtcgccagctcagacgcaggccgggaataataaccatgaataatgaacaacgcggcgtcgcgctgctcattgtactcatgttactggcgctcatggctgctctggcagcagacatgacgctcagttttcacagccagcttcagcgaacccgccaggtaaaccatcatctgcaacggcaatatgatattgaactggcggagaaacttgcgcttgccagcctcacccaggacgttaaagataacgacagacagaccacgttgcagcagtactgggcacagccacaacagttgcagctggaagatggcaatacagtgaagtggcagttacgcgatgcccagcactgttttaatctcaatgcgttagcaaaaatctctgacgacccgctggcttcccctgatttccccgcccaggtattcagtgcgctgctgattaacgccggtatcgatcgcggaaacaccgatgagatcgtgcaatcaatcgctgactatattgatgtcgatgactcaccacgctttcacggcgcagaagatagcttttaccaaagccagacgccgccccggcatagtgccaatcagatgctttttctgactggcgaattacgtcagataaaaggcataaccgaaaacatctatcagcggcttatcccgtatgtctgcgttctcccgaccacggaacttagcatcaatcttaatatgctaacggagaacgatattccgctcttcagagcgttattcctcaataacatcacggatgctgacgctcgggtcttattgcaaaaaaggccgagggaaggctggctaaccacggatgcatttctttactgggcgcagcaggatttctccggtgtgaagccactggttgctcaggtgaaaaggcatctctttccctatagccgctattttacgctgagtacggaaagtatcagcgacgaacaatcccagggatggcaaagccatatttttttcaaccgtaaacagcagagcgcccaaatctatcggcgtacgctgcaactctactaatcataaggatcgtgatgcctgaatcgttgatggtcatacgttcttcctcgacgctgcgtaagcattgggaatggatgacgttctccgcagatagcgtatcttcggtacatacgctcacggacgatcttccgctggagtcgctggccgatcagcccggtgccggaaatgttcatcttttgatcccaccagagggccttttatatcgttccctcacgctgcccaacgccaaatacaaactcaccgcacaaacattacaatggctggcagaggagacgttacccgacaacacccaggactggcactggacggttgtcgataaacaaaacgaaagtgtcgaggtgataggcattcagtcggagaaactcagtcgctatcttgagcgtttacatactgccggactcaacgtgacgcgggttttgccagatggctgctatcttccctgggaagtagatagctggactctggttaaccagcaaacaagctggctcattcgcagtgccgcacatgccttcaacgaactggatgaacactggttacagcatcttgctgcccagtttccgcctgagaatatgctttgttatggtgtagtacctcacggcgttgcagcggccaatccacttatccagcatcctgaaataccatcactgagtttgtattctgccgatattgcattccagcgctatgacatgctgcatggtatttttcgtaaacagaaaactgtaagcaaatcgggaaaatggctcgcccgcctggcagtaagctgtctcgttctcgccattctttcttttgttggcagccggagcatcgcgctctggcatacgcttaagattgaagatcaacttcagcaacaacagcaagaaacctggcaacgttatttcccgcagatcaaacgcacccacaattttcgtttttactttaagcagcaactcgctcagcaatatcctgaagctgtgccgttgctctatcatttacaaacacttctgctggaacaccctgaactgcagttaatggaggcgaactatagccagaagcaaaagtcgctgaccttaaaaatgagtgctaagagtgaagctaatatcgatcgtttctgtgagttaacacagtcctggcttccgatggaaaaaacagaaaaagatccggtcagtggtgtatggacagtaaggaactcagggaaatgattaaatcatggtgggcagaaaaatccacatcggaaaaacagatcgttgcggcactggcggttctctcgctcggcgttttttgttggcttggggtgataaaaccgatagatacctacattgcagagcatcagtcccacgcgcaaaaaattaagaaggacatcaaatggatgcaggatcaagcgagcacccatggtttactcggtcatcctgcgcttacgcagcccatcaaaaatatccttctcgaggaagcaaaacgtgagaatttggctatcacgctggaaaacggcccggacaatactctgacaattcatcctgtcacagctcccctcgaaaacgtctcccgctggctcactacggcacaggtaacatacggtattgttattgaagaccttcagtttactcttgccggaaacgaagagatcaccctcaggcatttgtccttcagggagcaacaataatgacaatgctactgccgctcttcattctggttggttttattgcagattattttgttaatgccatcgcctatcacctctcgccgttggaggataaaacggcgttaacgtttcgccaggtattggttcatttcaggcaaaaaaaatatgcctggcatgatacagtgcccctgatactttgtgttgctgctgctatcgcctgcgccctggcacctttcacgcccatcgtgactggcgcactctttctctatttctgtttcgtactcacgctcagtgttattgattttcgcactcagctcctgcccgacaaactcaccttaccgctgctctggcttggcttggtatttaatgcgcagtatggattaattgatttacatgatgcggtttacggcgcggtagcgggctatggggtgctgtggtgtgtttactggggcgtctggttagtttgtcacaaagagggattgggctacggtgatttcaagctactggccgctgcaggcgcatggtgtggctggcaaacgttgccaatgatactgctgattgcctcgctgggtggcattggttacgccatcgtttcacaacttctgcaacgccggactataaccactatcgcattcggcccgtggcttgcgctcggcagcatgataaacctggggtatctggcctggatctcttattaaccgggagggttctccctcccgacacggctcaaccttcttcgcggatctgtgcttgcagataattttgcaggcccatcttctgaatcagatcaagttccgtttccagccagtcgatatggccttcttcatcacgcaaaatttctatcatcatatcgcggctgacgtaatcatgaacgctatcggcataaccaattgcctcacgcaaattcttcgcgccatccagctcaagtgccagatcagaacgcagcatttcctcaacatcttcaccaatgttcagtttgcccaggtcctgtaagtttggaagaccttccagaaaaagaatgcgctcaatataacgatcggcgtgtttcatctcatcaatggattcatgatactccacatcattgagacgtttgagaccccagtttttaaacattcgggcatggagaaagtactgattgattgcgacaagctcatttcccaacagtttgttgagataatttataactttagtatcacctttcattttttgactccttcgcttccactctttgaagagtagaacggcttacgagtaagtcaaaaaacacactccgtttatgcggactccttaaactccggcagctgcattaattcatcctccatcacttcacgcgcggcccggacacatttaccgcactgattgccgaccggaataaatttttttaattgctggaacgagtgaggggaaaactggcgcacagcctgacgaatttttttatcgctgataccattacaaagacaaacgtacatagagactcccgtatactttcttcaaaaataaatgaaaatagttcttatttcaattacggaaagactcttttttaagcaaagaatagaaatatgaataaaaataatgggctaccaaaagtagcccattgacaaaaaatgcggcgatactggaaggtatcgccaacacatttattgcttagtaaacggcgcgaagatttcgctaaatgcgtacttcggtgcctgttctttagtcaggccgtggaattccggagacaggttagtgccgcccggcaggtcgcgcgcgattgaccagataccaaccataccgagattacgcttctgcgcatcctgcatgaccagacgagcatcagagagatagaacacctcgccctgaacgtcgttcacgccaaccatcggcgtggtacccatcatagcgtcaatttctgcatcgctcttattgggatggaggcctttcaattgtgaatgcaggttggcaatcgcagacgttgcacacttaccgtgaatgttctggccttcggtatttgcagactgacaaatcgcgttaccgtagtccattgtcatcacgttcacacccgccagctcaacacctttcgctttggcatcgctcaggacattcatcccttccggcgtcaggccagtcggcagaattggcaaggtgtaccagatagcaatatctttgccttctgacttccatttatcctgcactttcttcacagcaaggttacgacgttcaatagatgcctgatccgcaacccaggtgccttcgatatcgaagtccaggactttgaggttcaggttatcaacgatgtcataataatgctgcatcagatcgtctacgttcttacaggaagcagccagcggagcgttgttagcaccaccgatagacagcatcacatcgccgccagcctcacgcagagctttgattttgctgtactgagcgtaattctgcataccgtaagcggtaccccatgtcggcagacaggtgttcgcatctttactcaccacaaacgccagcgtgaagtggttgacgttatgattcttagccagcgcagccagatccgggatcgtattcagcgtaaagtcgacatacggtgcataaacgtgtttcggccacgctttcttcggcgtacctacgcgctctttggttccggtccagtcaacaaaaacacgccacgggttgctgtcagaaggagaaactttctgcactttactctgagaaatgtagttcacaccgttaaagcgaatcagcgtatcgctggcataaagcgtttctggattaaactgcggcgcattattcagctcttcgttgctatagctctgagccttacctaacggcttccacgggcggctattgctaccggtggcgttttggttcgccaccagagcagggttgtcactttgcgtccagaacagcgcttcataagcctgcccatcaacaacaacgcgatcacctttcacgtacacagtggatgcggaccatgctttcgccggttcgtatttcttccacgggttatcgccgcccgggacaaagccccatgcgtcttgatcgacagaagttttataatgtgcatcgttataatctacgatgctgtccgcgctgtacgctttgctggcctggaaaccatccgcaacaatgacgccgccgttatcaatttcacaggtagtcgggttaccgtactgactcaattccgcagcggtagctgtacgctcgagacgccatgggttattggagttttcagcgctggtaccccgtgggcaatctttagacccaacccatcaggcgttcttgtaaacattaccattgaaaataacatggtaaatttcgctaccttcctggccgctccacgcttgcaatgagtaatcgttaacgctatccgctggtgttgatggctcgctgttatccggagttggggtcaccggtgtttccggagttggatcaaccggagtcacagcaccgccattattatccggcttaacggaacaggagccagggttaccatactggctgatttctgttgccgttgccgcgcgaacataacgccatgggttactggcatcgttttctttcgcatcgcctgggcaatttgccgcgcctacccaccaggcgttcttataaatgccgccgttatagataacgtaccatgtagaagaaccttcctgacctttccaggctactacagcatagttgtcgtttgacttatcagctggggctggctgaacatcaggagccggtttaacgtccggtgccggtttcacatccggtgaaggctgtggtgctgaagtacaggactgtggattactggtttctgagatttccgttgccgtagcggcacgaacataacgccatgggttgctggcatcattgcttttcgcatcacccggacagttagaagaggctacccaccaggcatttttatataccgcaccattaaagacgacataccaggtctgaccgccctgctgtttattccaggcaactacagaagaattagacggaacagtgccctgtgctggtgtagccgaaccgccattagccggcgtattggatgcaggcgtatttgaatttgaagaagatgagctgccgctcttttcgcaggaaagtgtattgccaaactgactaatttcagcagctgttgcggtacgctttaaacgccacgggttagttgcatcatttgctttcgcttttcccgggcaatttgtagaagaaacccaccaggcattttcataaattttgccatcgaaaataacctgatatttattaccaccttgttggttattccatgcttccattgccaatgctggcagagcggaacacaccagccccataccaatcatagatttagtaaatatatttaatttcattataatcccttgtgacgtaaaaactgcaaaacaaaagtcctacgcaggaattatttacgttttacgagaacccttcaatatgaattaaattacggcattaaaaataagaaaaaagcctgacaaatgaagcattttaaaaacagaaacattcatatttaaaatgttaaattgaattgatattttaaatatgaataatttattcgttctgacagtacgaataagatatgccgtcaacaaatgcaaaaagggcgccgaagcgcccttttcaattcaaaactaattaacgtgtaattagcccagaactttagcaacaacgcccgcgccaacggtacggccgccttcacggattgcgaaacgcagaccgtcgtccatcgcgatcgggtggatcagggtaacaaccattttgatgttgtcgcccggcattaccatctctacgccttccggcagttcgatggtaccagtcacgtcagtagtacggaagtagaactgcggacggtagcctttgaagaacggagtatgacggccgccttcatctttggacagaatgtacacttcagattcgaacttggtgtgcggcttgatggtgcccggcttagccagtacctgaccacgttcgatttcttcacgtttgataccacgcagcagaacacctacgttctcaccagcacggccttcgtccagcagtttgcggaacatttcaacgccagtacaggtagacttctgagtctctttgataccaacgatttcaacttcttcaccaactttgatgataccgcgttctacacgaccggtaacaacggtaccacgaccggagatggagaatacgtcttcgatcggcagcaggaacggcttgtcaatcgcacgctctggttccggaatataagaatccaggaagccagccagttccaggattttcgcttcccactctgcgtcgccttccagcgctttcagagcagaaccacgaacgatcggagtgtcgtcgcccgggaagtcgtactgagacagaagttcacgaacttccatttcaaccagttccagcagctcttcgtcatcaaccatgtcgcatttgttcaggaacacgatgatgtacggaacgcctacctgacgacccagcaggatgtgctcacgagtctgcggcatcgggccgtcagtcgcagcaactaccaggatcgcgccgtccatctgagcagcaccggtgatcatgtttttaacatagtcggcgtgccccgggcagtctacgtgtgcgtagtgacgggtcggggtgtcgtattcaacgtgagaagtgttgatggtgataccacgagctttttcttccggcgcgttatcgatctggtcgaatgcacgagcagcaccgccgtaggttttagccagtacggtggtgattgcagcggtcagagtagttttaccgtggtcaacgtggccgatagtaccaacgttaacgtgcggttttgtacgttcaaatttttctttagacacggctatattccttactatagtgctctccccttcaggagagagcacgggactttggtattaacccttaggcttatttaccacgggcttcaattacggcctgagcaacgttactcggcgcttcatcatacttcaggaattccatagtgtatgatgcacgacctttggtcagagaacgcagctgagttgcgtatccgaacatttcagacagcggtacttcagcgtggatcttaacgccagtaacttcagattcctgacctttgagcataccacgacgacggctcaagtcaccgataacgtcaccggtgttctcttccggagtttctacttcaaccttcatgatcggctcaagcagaactggtttcgctttcttaaagccttctttaaaggcgatagaagcagccagtttaaacgccagttcagaggagtcaacgtcatggtaagaaccgaagtgcagacgaatacccatgtctactaccgggtagcctgccagcggacctgctttcagctgttcctggatacctttatcaacggccgggatgtattcgccagggattacaccacctttaatgtcgttgatgaactcgtagcctttcgggtttgaacccggctccagcgggtacatgtcgataacaacatgaccatactgaccacgaccaccagactgtttcgcgtgtttaccttcaacatcggtaactttctggcggatagtttcacggtaagcaacctgcggtttacctacgttcgcttcaacgttgaattcacgcttcatacggtcaacgatgatgtcgaggtgcagttcgcccatacccgcgatgatggtctggttagattcttcgtcagtccatacacggaaagacgggtcttctttagccagacggcccagagccagacccattttttcctggtcagctttggttttcggttcaactgcgatggagattaccggctcagggaattccatacgttccagaatgatcggcgcatccgggtcacacagggtgtcaccagtggttacgtctttcagaccgatagcagcagcgatgtcgcccgcgcgaacttctttgatctcttcacgtttgttagcgtgcatctgaacgatacgaccgaaacgctcacgtgcagctttcacggagttcagtacggtatcaccagagttaaccacaccggagtaaacacggaagaaggtcaggttaccaacaaacgggtcggtagcgattttgaacgccagtgcagagaacggctcgtcatcacttgcgtgacgttcagccggagtgtctttaccgtcgtccaggataccgttgatcgcaggtacgtcaaccggggatggcaggtaatcaattaccgcatccagcatcgcctgaacacctttgttcttgaacgcagaaccacaggttaccaggatgatttcgttgttcagaacgcgctgacgcagagcacctttgatttctgcttcagtcagttcttcaccacccaggtatttttccatcagctcttcagaagcttcagctgcggattcgatcaggttctggtgccattcgttagccagttcaaccatgtctgccgggatatcttcgtattcgaaggttacgccctggtcagcgtcgttccagttgatagctttcattttcaccaggtcaacaacaccggtgaaatgttcttcagcaccaatcgccagctgcagcggaaccgggttcgcgcccagacgggttttgatctggttaacaactttcaggaagttcgcacccatgcggtccattttgttaacgaacgcaatgcgcggaactttatatttgtttgcctgacgccatacggtttcagactgcggctgaacaccaccaactgcgcagtaaaccattaccgcaccatcgagaacacgcatggaacgttctacttcgattgtgaagtcaacgtgccccggggtgtcgatgatgttgatgcgatgcggctcatactgcttagccataccagaccagaatgcagtagtcgcagcggaagtgatggtaataccacgttcctgctcctgctccatccagtccatggttgcagcgccgtcatgaacttcaccgattttatggtttacaccggtgtagaacagaatacgttcggtagtagtggttttaccggcgtcgatgtgcgcactgataccgatgttacggtagcgtgcgatgggtgttgtacgagccatttgtttcctcgtttatcttttaggcgttcaatttaagtagcccaaagcgggctgcttactggaagcgcccgcctggtgactaaaactccgaagggataaccaacggtagtgtgcgaacgccttgttggcttcggccatacggtgaacgtcttcacgtttcttaactgcagtacctttgttttctgcagcatcagaaagttcgttcgccaggcgcagagccatggatttatcaccgcgtttacgagcagcttcaacgatccaacgcattgccagagcattacgacgaaccggacggacttcaactggtacctgataagtagaaccaccaacgcggcgagacttaacttctacagtcgggcgcacgttttcgagagctacttcgaatgcttccagttcagatttaccagagcgctgagccagggtctccagcgcgctgtatacgatagattcagcagtagattttttaccatctaccatcaggatatttacaaatttagccagcagttctgatccgaacttcggatccggcagaattttacgctgaccaatgacgcgacgacgtggcatggaaatactccgttgttaattcaggattgtccaaaactctacgagtttagtttgacatttaagttaaaacgtttggccttacttaacggagaaccattaagccttaggacgcttcacgccatacttggaacgagcctgcttacggtctttaacgccggagcagtcaagcgcaccacgtacggtgtggtaacgaacacccgggaggtctttaacacgaccgccacggatcaggatcacggagtgctcctgcaggttgtgaccttcaccaccgatgtaggaagtcacttcgaaaccgttagtcagacgaacacggcatactttacgcagcgcggagttcggttttctaggagtggtagtatatacacgagtacatacgccacgtttttgcgggcatgcttccagcgcaggcacgttgcttttcgcaactttgcgagcacgtggtttgcgtaccagctggttaactgttgccattaaatagctcctggttttagcttttgcttcgtaaacacgtaataaaacgtcctcacacaatatgaggacgccgaattttagggcgatgccgaaaaggtgtcaagaaatatacaacgatcccgccatcaccaggccatctggctggggtgcttaaccgtaagtctgacgaaatcagtatagtcaatgagaatgatgtcgttcgaaatttgaccagtcaaaccgcgggcaataaggtcttcgttcagggcatagaccttaatgggggcattacgcagactttcaaggtagcggttaccgtcaactgcggcagttacgccatcttgcaataatagcagttcgtctccttcactgagcagacgcagcagcgcagcaaaatccgtcagccagggtgagcgatgtaatgtgtgcagcataaacgcctcaaaacctcaaaataacatcgtagttggcgagttcgcggcgtaaggcatctgcttcgagcggcgtggcttcgacaacaaagggtgtctgcggatctaacccgcgttcgcgcagtgaagccgcacaaacccagcactgttcaatgtcgtacagacccaacaatttaaaagtggcaatgtaatcacgcgccagcactgcatcgggcttttgtcctggcagcagctgaaaaacgccatcagctataaagaagacagccagatcgtcagttaatgcggaagttgccagtaaagcatctaaaccttcccggcctgcggctgtaccatgaggtgcagtagaaaaaacaaacgcaattcgtttcatcagaactgtaccaccctgtcacaggtcagcgaggcttccgccagcgccccaagtccgcttaaggtaaatccctgctgaaggtttgacgaagccagccccagtcttccggcctccgtttcatcaacaacgccacggcgtaatgctgccgctacgcagatattcagcgccacaccatgttgcgcattcagttgttgccaggcccgtacgaggtcaaattcgtcacttgccggagaggtcaattggttagcgttatagaccccttcccgatagaaaaagacgctgcttaactcatggccatctgctatcagcgcctgcgcaaactgaaaagcactactcgcctgttgcgtaccgtatgctggcccggtcaccacgatggcaaaacgcattacttatcttgcccctggaaatcaccgctcttgaactggcggatgtagagatagacagtgtgtttggagatgttcaggcggtcagcaacctggttgatcgcatctttaatatcgaagatccctttctcgtagagattcagcacgatctgacgatttttggcgttattagaaacattgcgatcggcattcacttcttcgatggtgaactccagcgtttgggtaaccagatcttcaacagaagaggcaaagttgacgcttgaaccgacatccggggtttctggcggcacaaaggtgctcataatctgcgagaagggaacatcaagattcatattgatgcacagcagaccaattacacgctgttcgcggttacgaatcgcgatagtcagggacttcattaatacgccgcttttggcgcgagtaaagtagcatttagaaacgctgctatccgctcccgtcatatcgtgcagcatacgtagcgccaggtcagtaattggcgaaccaatcttccggcctgtatgttcaccgttagcaatgcgaatggctgaacattttagatcctgcaaagagtgcaaaacgatttcacagtgggagccaataagcatcgctaacccgtccaccaccgcttcgtaggatttcagaatatcaaaatcggtctggtcgaaaggacgttgatccagtaaatccaactcactggtttcgttggttaaaagcgacctggacatgaaaaaaaacactccttttcaggagcctgtcgttaacttttcagggcaggctcattaatgatgcgggtaactaaattaatacagcggaggttccgctttccagcactaattatatccggcctgtaataaaaaaaccgccgcctggtcaggcggcggttcttaatgcttattttttagcagaatctgcggctttcgcatcagcttccggctttgcatcagccttcggcgctggtttcacatccagcagctctacgtcaaacaccagggtagaattcggtgggatccccggaacacccgctttgccgtaagccagttctggtggaataaccagtttgatcttaccgcctttcttgatgttcttcagaccttctgtccaacccgggataacaccgtccagacggaaagaaagcggttcaccacgggtgtaagagttgtcgaactctttaccgtcgatcagcgtacctttgtagttcactacaacagtatcgctgtctttcggtgcttcgcctttaccggcttctactacctgataaaccagaccagttgaagaggttttcacacctttctctttggcaaatttctcgcggtactctttaccttttgcttcgttatcagccgcgtctttttccatcttcgcctgagcagaagacttcacgcgagcttcgaatgcttgtagagtctgttcgatctcttggtcggagagtttgctcttatcagcaaatgcatcctgaacaccagcgatcagctgatctttatccagtttgatgcccagtttttcttgttcttttagagagttttccatgtaacgacccagcgaggcacccagtgcataagctgatttctgatcgtcatttttgaacgctgctttgctgtcagcagctgtagcaggttttgcagcttcagcagcaaaagtgattggtgcatgcagggcaacggccattgtggtcgccagcagcgttactttaaacagtgatttcatccatatctccaggatcggggcatctcaccccagggttaactattatcagaagggtactataaagcgttgtcgaacaaatctacatacagacacgccctattatcatctattttcagactctttttgtttaaattagtttcgatgaccgcgaaatgagtgctgtctcgggcagcaaagttaagtagaatccgcggcgaccattcgacaaaagaggtgaatcatgcaggatttatcattggaagcacgcctggcagagctggagagccgactggcttttcaggaaatcaccattgaagaactgaacgtcacggtgaccgctcatgaaatggagatggcgaaactgcgcgatcatctgcgtctgctgaccgagaagttaaaagccagccagccgtcgaacatcgcgtcgcaggctgaagaaacgccaccgccacattattgaggcgtaaaaaaagcggggattccccgcttttttgtcactttttcggtattagtggcaaccgcaaccgccgttgcctttaccgccacagcagccttcgccaccgtgttcatgaccgtgatcgtggccatgaccgccgcagcaaccgtcgtggtcgtgatcgtggtggtgatcgtgcgcgccgtgaacgtgaccatgagccagttcttcttcagtcgcttcgcgaatcgccacaacttcaacgttgaatttcaggttctgaccggccagcatgtggttaccatcaaccacgacgtgatcgtcttcaaccgcagtgatttcaaccggtaccggaccctggtcggtttcagccaggaaacgcatacctacctgcagttcatcaacgcccataaatacgtctttaggaacacgttgcaccaggttttcgtcgtactgaccgtaagcgtcgttcgcgccaacagcgacatcaaatttgtcgccaacttcatgaccttccagcgccgtttccaggccagagatcagggaaccgtgaccatgcaggtagtccagcggcgcactcaccggagactcatcaaccaacacaccgtcttctgtacgtacctgataggccaggctgaccaccaggtcttttgctactttcatgatatctcctgagcatgggaagaatagtggcgcagattgtagcggaattctgcagccgtgtactcactagcttaaaaaaactcggcgcatatcgctagtccggatgaaaaatcccgatcacttgctcatctttgcgaacgtgatcgcgggcttctttgtctgcttctcgcatctgatgtccgcacttaacacattcaacaatatcaatattattttcgcgccacatcgccattgaatcctgcgcctgacaggccgggcattttgcgcccgcaataaaacgttttcggattgccatctttaccctctactcaaattcatcccagccgtccagctggcgtcgttcttgttgcatttcacgctggaaaatctcttccagttcgcgtcgggcttccctggcgcgagaaatttgtacggtatcggcatgcattgggatgagctctcgcagcatccgcatatccaggcggcgaaaatgcagttgcgctcgctgtgcctgatgcggatgcatgccaagcgtgaccagcgtcttgcgccccagctctaacgcactggagaatgtttcacgggaaaactgcgtcacccctgcctgtaataactcatgcgcttccacacgtccgcgcgctcgcgcaagaatatgcaaatgcggaaagtgctgttggcatatttccaccagcttcatggtgtcttccggctcgttacaggtaatgacgatagactcagcggcctctgcacccgcagaacgtaaaagatcgacctgcgtggcgtcgccgtaataaactttgtagccgtatttacgcatcaggttaacggcgctgatatcccgctccagcacggtaatgcgcattttatttgccatcagcaaacgaccaatcacctgaccaaaacgcccgaagcccacgacaatgacctggggtttatcatcgttgacccacggtttttcgtcttcttcttccggtccgttaaactggcgggatagccatttatccaccagcttcatcagcaacggcgtggtcatcatggaaagcgtcaccgtcaccagcaacaacgccatctggtcgccctggaataagcgttgtgaagaagcggtagaaaagaggacaaaggcaaactcaccaccctgactcaacacgccagcaaactgcatccgctctgagctacgcacgccatacaatcgcgccagcagatacagcacgagaattttcaccgccaccagcacaaccacgcttatcactacccacaacagatgggtataaagcaccccgaggttgagtgacatgccgacagagataaagaacaaaccgagcagcaagcctttgaagggatcgatagccgtttccagttcatggcgatattcactttccgccagcagcacgcccgcaataaatgtaccgagcgccatcgacagccccagcgcatccataaacaatgcggaacccaacaccagcagcagcgtcgcggcggtgaacacttcccgcacgccagaagctgcaataaagcggaataccggacgcagtaaatagcgcccaccaatcagcatgccgacaaacgccagcaccttcatgccgaccttcatccagtcgaaatgttcgtctgccgaccccgccaacaacggcactaacgccagtgctgggattactgccagatcctgaaacagcagaaccgaaaacccgagctggccggattcgctgcgattcatccctttctcacgcatcaattgcaacgccattgcagttgaagacatcgcaaggccaatgccaccgaccaccgccgcctgccaggcgaaatccgtcagcatcaataatcccgccagcaacgccgcgcttaacagcacctgtgccgcgcctacgccaaaaatcgaacgccgcagttgccaaagtttggagggattcaactcaaggccgatgataaacatcaggaataccacgccgagttccgaaaagtggaggatctcatcgacgtcgctaataaaccccagcccccacgggccaattgcaatccctgccagcaaatatcccaacacagcgccaatacccagccgcgatgccagcggcaccgcagccaccgccgcgaagagaaacagcactcctgcgagtaaaaaatcggaaccttccatcagcggcctcctggagacagcggatttgccagccagtcaccgtaggctctggcgtggctcgccagctcctgtgcgctttgccgtctcgcccagtaaataatgatgggacttaaccaatgcatccggcacatgcccgccgccagttcaaaggggcgcagcacatcgctcatcgggtagcgattcagcgcgtcataacggtaagcactttccggctcgccggtggtaatcacgctacgccagtactttcccgccagttggtttcctcccggcccgctggcaaaaccacgacttaatacccggtccagccactctttcagtagcgccgggcagctataggtataaagaggatgctgaaagacaatcacctcgtgctcgcgcagtaatgcctgctcacgggggatatcaataaaaaaatcgggatagtgcgcgtaaaggtcgtgcacggtaacattgctgagctgcgtggccggtttaagcagtacccggtttgccaccgagtcctgagattccggatgggcatacagcagcaaaactttcgctggctgagacatcatccccctcccggtatggtttttgtgtatagtcgctgttttgggctaccattgcgcccggtgcggcagctcgcccatacattacattatcataatgataagttaacatagtctgaacatacggcaccttatgattgttttctcctcgttacaaattcgtcgcggcgtgcgcgtcctgctggataatgccaccgccaccatcaaccctgggcagaaagtcggcctggtgggtaaaaacggctgtggtaaatctaccctgctggcattgctgaaaaatgaaatcagcgccgacggcggcagctacacctttccgggaagctggcaactggcgtgggtgaatcaggaaacgccggcgttaccgcaagcggcgctggaatatgtcattgacggcgaccgtgaatatcgtcaactagaagcgcagctacacgacgccaacgaacgtaacgacgggcacgccattgcgaccattcatggcaagctggatgctattgacgcatggagtattcgctcccgtgctgccagcctgctgcacggcctcggtttcagcaatgaacaactggagcgcccggtaagtgatttttccgggggctggcgtatgcgtcttaaccttgcccaggcgctgatttgccgttcagacttgctgctgctcgacgaaccgactaaccacctcgatctcgatgccgttatctggctggaaaaatggctgaagagctatcagggcacgctgatcctgatctctcacgaccgcgacttcctcgatccgatcgtcgataaaattattcatatcgaacaacaaagcatgttcgagtacaccggcaactacagttcgtttgaagtacagcgcgccacccgtctggcgcagcaacaagcgatgtacgaaagccagcaggaacgcgtagcgcatctgcaaagttatatcgaccgtttccgtgccaaagccaccaaagcgaagcaggcccagagccgcattaagatgctcgagcgtatggagctaattgcccccgcgcacgtcgacaacccgttccgctttagcttccgcgcgccggaaagcctgccaaatccgttactgaagatggaaaaagtcagcgcgggctatggcgatcgcattattctcgactcgattaaactgaacctggtgcccggctcgcgtattggtctgttaggccgcaatggcgcgggtaaatcgacattaatcaaactgttagccggtgaacttgcgccagtcagcggtgaaattggtctggcgaaagggatcaaactcggctacttcgcccagcatcaacttgaatacctgcgcgccgacgaatcacctattcaacatctggcacgtttagcgccgcaggagctggaacaaaaactgcgtgactacctcggcggctttggtttccagggcgataaagtaaccgaagaaacgcgccgcttctccggtggggaaaaagcccgcctggtgctggcattaattgtctggcagcggccgaatctgctgctgctcgacgaaccgactaaccaccttgacctcgacatgcgtcaggcactcaccgaagcattaatcgagtttgaaggcgcgctggttgtcgtttcgcacgaccgtcatttgctgcgttccaccactgacgatctctacctggttcacgatcgtaaagtcgaaccgttcgacggcgatctggaagattatcaacagtggttgagcgacgtacaaaagcaggaaaaccagaccgacgaagcgccaaaagagaatgcgaacagcgcccaggcacgtaaagatcagaagcgtcgggaagctgagctgcgtgcgcaaacccagccactgcgtaaagagattgcccgtctggaaaaagagatggagaagctgaacgcgcaactggcgcaggcggaagagaaactcggcgacagcgaactgtatgaccagagccgtaaagcggagttgaccgcctgcctgcaacagcaagccagcgccaaatccggcctggaagagtgcgaaatggcatggctggaagcccaggagcagcttgagcagatgctgctggaaggccaaagcaactgatggcgcagataacgacgaccgatgccaatgaattcagcagcagtgctgaattcatccccatgcgcggctttagcaattgtcatctgcaaaccatgctgccgcgtctgtttcgtcgtcaggtgaaattcaccccgtactggcagcggctggagttgcccgacggcgattttgtcgatcttgcgtggagtgaaaaccctgcacaggcgcaacataaacctcgtctggtggtgtttcacgggctggaaggcagtctcaacagcccttacgcccacggtctggttgaggcggcgcaaaagcgcggctggctgggcgtggtgatgcattttcgcggatgcagcggtgaaccaaaccgtatgcaccgcatttaccattcgggcgaaaccgaagacgccagttggtttttacgctggctgcaacgcgaatttggtcatgcgccaacggctgccgtcggctattcgctcggcggtaatatgctggcctgtttgctggcaaaggaaggcaatgatctcccggttgatgcggcggtgattgtctctgcgccgtttatgctggaagcctgtagctatcatatggaaaagggcttttcccgcgtttatcagcgttacttgctgaacctgttaaaagccaatgccgcgcgcaagctggcagcctaccccggaacgctgccgattaatctcgcgcagttaaaatcggtacgtcgcatccgtgaatttgacgatctcatcaccgccagaattcacggctacgccgacgctatcgactattatcgtcagtgtagcgccatgccgatgctgaaccggatcgccaaaccgacgctgattattcacgccaaagacgatccgtttatggatcatcaggtgatcccgaaaccggaaagtctccccccgcaggtggagtatcaactgactgaacatggcggtcatgttggctttattggcggtacattacttcatccgcaaatgtggctggagtcacgcattcctgactggttaacaacgtatctggaggcgaaatcatgttgattccgtggcaagacctctcccccgaaacgctggaaaatttaattgaaagctttgtgttacgtgaaggcaccgattatggtgaacatgagcgtacacttgaacagaaagtcgccgacgtcaaacgccagctacagtgcggagaagcggtgctggtatggtcggagctgcacgaaacggtcaatattatgccgcgcagtcagtttcgcgaataacctgcaaccgtcggcggacgagataataatgatagctaagtcatggagttactatgtctgccaaacatccggtcattgcggtaacaggatccagcggcgcggggaccaccaccaccagcctcgcgtttcgtaaaatattcgcgcagttaaatctgcatgcagctgaggtggaaggcgacagttttcaccgttacacccgcccggaaatggacatggcgatccgcaaagcgcgcgacgccgggcggcatatcagctacttcggccccgaggctaacgacttcggcctgctggaacaaaccttcattgaatacggtcagagcggcaaagggaaatctcgcaaatatctgcatacctacgacgaagccgtaccgtggaatcaggtaccggggacattcaccccctggcaacctttaccggaacccactgatgtactgttttatgaaggtttacacggcggcgtagtcacgccacagcataacgttgcgcagcatgtggacttactggtcggcgtggtgcctatcgttaaccttgagtggattcaaaaactgatccgcgacaccagcgagcgcgggcactcacgagaagcagtgatggactcagtagtgcgttcaatggaagactatatcaactacatcacaccgcagttttcccgcacccatcttaacttccagcgcgttcccaccgtcgacacttcaaacccgttcgcggcaaaaggtatcccgtcgctcgatgaaagctttgtggtgatccattttcgtaatctggaagggatcgatttcccctggctgctggcgatgttgcaaggctcattcatttcccacatcaatacgttagtggtaccgggcggcaaaatgggtctggcaatggaattaattatgctgccgctggtgcaacgattgatggaaggaaagaaaatcgagtaactctgctattacgccggataaaatactatccggcttcacaacgggatagttaagtcacgcggcaaccacttcatacgagtgagtaatattcaccgctttttccagcatcaacgccactgaacaatatttctcggcagagagatcaaccgcacgcgcaaccgctgcgtctttcaggtcgcgaccggtgacgataaaatgcagattaatgtgcgtaaacaggcgtggtgcctcttcgcggcgttcagaggtcaattttacttcacaatcgaccacatcctgacgccctttttgcaggatcgaaaccacatcgatggcactgcaaccacccgccgccatcaacaccatttccatcggacttggtgctttatcgcctgagttgccgtccattaaaatctgatgaccagaggcggattcgcccagaaaagttaacccttcgacccacttcactcgcgcttgcatttttgctactccactgcgtcaattttcctgacagagtacgcgtactaaccaaatcgcgcaacggaaggcgacctgggtcatgctgaagcgagacaccaggagacacaaagcgaaagctatgctaaaacagtcaggatgctacagtaatacattgatgtactgcatgtatgcaaaggacgtcacattaccgtgcagtacagttgatagccccttcccaggtagcgggaagcatatttcggcaatccagagacagcggcgttatctggctctggagaaagcttataacagaggataaccgcgcatggtgcttggcaaaccgcaaacagacccgactctcgaatggttcttgtctcattgccacattcataagtacccatccaagagcacgcttattcaccagggtgaaaaagcggaaacgctgtactacatcgttaaaggctctgtggcagtgctgatcaaagacgaagagggtaaagaaatgatcctctcctatctgaatcagggtgattttattggcgaactgggcctgtttgaagagggccaggaacgtagcgcatgggtacgtgcgaaaaccgcctgtgaagtggctgaaatttcgtacaaaaaatttcgccaattgattcaggtaaacccggacattctgatgcgtttgtctgcacagatggcgcgtcgtctgcaagtcacttcagagaaagtgggcaacctggcgttcctcgacgtgacgggccgcattgcacagactctgctgaatctggcaaaacaaccagacgctatgactcacccggacggtatgcaaatcaaaattacccgtcaggaaattggtcagattgtcggctgttctcgtgaaaccgtgggacgcattctgaagatgctggaagatcagaacctgatctccgcacacggtaaaaccatcgtcgtttacggcactcgttaatcccgtcggagtggcgcgttacctggtagcgcgccattttgtttcccccgatgtggcgcagactgatttatcaccccgatatcaactatgcacttcgacaaacgctggtgctatgtttgcccgtggccgttgggttaatgcttggcgaattacgattcggtctgctcttctccctcgttcctgcctgttgcaatattgcgggccttgatacgcctcataaacgttttttcaaacgcttaatcattggtgcgtcgctgtttgccacctgtagcttgctgacacagctactactggcaaaagatgttcccctgccctttttgctgaccggattaacgctggtacttggcgtcactgctgagctggggccattgcacgcaaaattgcttcctgcatcgctgctcgccgccatttttaccctcagtttggcgggatacatgccggtctgggaaccgttgctcatctatgcgttgggcactctctggtacggattgtttaactggttttggttctggatctggcgcgaacaaccgctgcgcgagtcactaagtctgctgtaccgtgaactggcagattattgtgaagccaaatacagcctgcttacccagcacaccgaccctgaaaaagcgctgccgccgctgctggtgcgccagcaaaaagcggtcgatctaattacccagtgctatcagcaaatgcatatgctttccgcgcaaaataatactgactacaagcggatgctgcgtattttccaggaggcgctggatttacaggaacatatttcggtcagtttgcatcagccggaagaggtgcaaaagctggtcgagcgtagccatgcggaagaagttatccgctggaatgcgcaaaccgtcgccgctcgcctgcgcgtgctggctgatgacattctttaccatcgcctgccaacgcgttttacgatggaaaagcaaattggcgcactggaaaaaatcgcccgccagcatccggataatccggttgggcaattctgctactggcatttcagccgcatcgcccgcgtgctgcgcacccaaaaaccgctctatgcccgtgacttactggccgataaacagcggcgaatgccattacttccggcgctgaaaagttatctgtcactaaagtctccggcgctacgcaatgccggacgactcagtgtgatgttaagcgttgccagcctgatgggcaccgcgctgcatctgccgaagtcgtactggatcctgatgacggtattgctggtgacacaaaatggctatggcgcaacccgtctgaggattgtgaatcgctccgtgggaaccgtggtcgggttaatcattgcgggcgtggcgctgcactttaaaattcccgaaggttacaccctgacgttgatgctgattaccaccctcgccagctacctgatattgcgcaaaaactacggctgggcgacggtcggttttactattaccgcagtgtataccctgcaactattgtggttgaacggcgagcaatacatccttccgcgtcttatcgataccattattggttgtttaattgctttcggcggtactgtctggctgtggccgcagtggcagagcgggttattgcgtaaaaacgcccatgatgctttagaagcctatcaggaagcgattcgcttgattcttagcgaggatccgcaacctacgccactggcctggcagcgaatgcgggtaaatcaggcacataacactctgtataactcattgaatcaggcgatgcaggaaccggcgtttaacagccattatctggcagatatgaaactgtgggtaacgcacagccagtttattgttgagcatattaatgccatgaccacgctggcgcgggaacaccgggcattgccacctgaactggcacaagagtatttacagtcttgtgaaatcgccattcagcgttgtcagcagcgactggagtatgacgaaccgggtagttctggcgatgccaatatcatggatgcgccggagatgcagccgcacgaaggcgcggcaggtacgctggagcagcatttacagcgggttattggtcatctgaacaccatgcacaccatttcgtcgatggcatggcgtcagcgaccgcatcacgggatttggctgagtcgcaagttgcgggattcgaaggcgtaatgcaggctaaaccatcggataaggcattcacgccgcatccgacatcttttgcctgatgcttcgtatttacgccccaaccaccttcgccaccgcgtgggcgaaacgttgcatcccttcatcgatatccgcatcttccaccaccagcgacggtgcaaaacgcatcacatccggtccggcattcagcaccattacgccagcctctgcgcccgcatacaggaaatcacgcgcccgacctttgtactgtggtttcagctctgcgccaatcaacagccccataccgcgaatatcgctaaatacatcgtactgctgatcgatcttctgcagatggtcaacaaaacgctggcgtttcgcctgaatgccttccagcacttcaggggtattgatgatatcaaacgccgcccccgctactgcacaggccagaggattaccgccgtaggtggaaccgtgagaaccaggatgaaacgcagaagcaatttccgccgtggtcagcatggcgctaatcgggaagccgccgcctaacgctttcgcagaggtcagaatatccggcgtaacgccgtagtgcatgtaagcaaacaaatcgccggtccgccccatcccgcactgcacttcatcaaacaccaataatgcctgatgttgatcgcacagctcgcgcaagccctgcaaaaactctggcgtcgctgccgtcacaccgccctcgccctggatcggctcaaccaccaccgcacaggtgtgatcatccatcaccgctttcactgcatggagatcgttaaagggaacgtggatgatgtctgccggtttcggcccaaagccgtcggaatattttggctgcccacccaccgaaacggtaaacagcgagcgaccatgaaaagcgttatggaaggcaataattttggttttgaacgggctatgacgcacacaggcgtaatggcgtgccagtttaaaggcggtttcgttagcttccgtgccggagttcataaacaccacgcgttcggcaaacgttgcctcaatcagtttacgcccaagacgcagcgccggttcattggtgaaaacgttactgatatgccacagagtttcgccctgggtttttaacgcgttcaccagcgcaggatggcaatggcccaacgccgtaactgcaatgccacccgcgaaatcgacatactccttgccttgctgatcccagattcggctgccctgaccttttaccggaataaactctgccggagcataaatcggcaggatcacttcatcgaaagtcgcgcgtgtaattgctgtttgttcaattgccatctcatgatcaccctgttacgcataaacaaatgtgaaattataaccacaaaatatgcataaaaaatcactaaatggcaatcagaaatcagcgatgcaggaaattagccagcagttgatgtccttgttcgctaagaatactttctggatggaactgcacaccttccagatcccactggcgatggcgaatccccataatctctcgggtttcgctccaggccgtcacgtcaaagcacgctggtaatgagtcaggttccaccaccagcgaatggtagcgtgtcacggtaagtggatttgccagcccccgaaatacgccctcaccgttatgtgtaatcggcgaggttttgccgtgcatgacctttgcggcgcgcacaactttaccgccaaatgcctgcgccattgcctgatgaccgaggcagacgccaagaatcggcaagcgcccggcatagtggcgaataacgtcaagggagatcccggcttcatctggcgtacaggggccaggtgagatgacaattttttgtggtttaagggcgtcgatatccgccagcgtcaacgcatcgttgcgcttaaccagcacatccgcccccagttcacaaaagtactggtagaggttccaggtaaaagaatcgtagttatctataagcaggatcatggcggctccggtacaaaagaaccgcgctattttactcagattccccggcttcgcttaccactttgctaaatatcatctgcagtgcggtgagatcccccattgccccactctgatttgcctgattccaggcctctttttcgataccctgccagctcagttgatatccggcatgaatcgccagttgctcgaagaagatccgctgtgccagaccacttcccacccggaagggatgcagcacgttgatttcacaatagtaatgcgccagccgctcgacgaacttcgctttctccaggccaaccagataaccttcttcctccagatcctgcatcagggcattgccctctttttcgatataagcaaagtggcagaacggcgtatcaccctgataaatatcaacttcacgcagttgccctgcccagtcgaaaatatcctgatacagctggcgatggatagttcgcaaatgcggtaaaccgcgcaccagcggaccaagctcaatggtcgcagcacgcagcgccgtcatttcgtaagcggcctgttccagccgctgctgctggcggatgttcagccggttacgcatgatatcaaggcctggataaagatacggatcgcgcccttcgccgaatttatcgctcatagtgactcctcagctcttcaaggcgcgctaaagcctctgcggcagtaagagtgactaaaggcatctcgacgccttcaagacggcgactggcctgaaaattacgattacgctgaagctcccagagacgggacttttgcttatcggtgagtttcttcacttgatgcctccctgaacgtgtccatttgccacaagtataagcggcaaatccgggttacgccgggagagcagaagcgcgggcaagattgcccgcgcgagaaatcattacggcaggactttagcggaaaggataactaccggttttgacggcacattctggtacggaccaacgtcatgagtcggcacctgggaaatcttatcggcaacgtccatgcctttcaccactttaccaaataccgcgtaaccgaaatcacgctgaccatggtcaaggaaggcgttatcggcaacgttgataaagaactggctggtggcgctgtctttgtcagcggtacgtgccatcgcgatggtgccacgcgtgttgcgcaggccgttatcggcttcatttttgattggcgggtttggttttttctgctgcatctgctcggtgaaaccgccgccctgaatcataaagccaggaatgacgcggtgaaaggtagtgttgttataaaaaccgctgttcacataatcgacaaagttttgcacagacactggcgctttttgtttatccagctccagttcgatgttaccagctgaggttgtcaacaatacgtgcgggtcccctttcgctgccattgctgcgggagaaagagcagaaagagcgaaaacagcagccatcgccgccagggtcgatttgaacatgagatttccttaacaaacagagcagaaaaaaagcaagtgaagagattctaaatagccttcaagaacaaggccatccctttacctaattttacgtatctgaaatatatgtaacctgacgatcactttttattccgtgatcaaaatcacctcttaaaatgcaatttagcaaccgattgcaataaaacatttaaacagatcacaaaatcacctaaaatcgcccgctcgcggcatatcccgctatgccattttatttttgaacgcaggccaatcatgactaacagcaatcgcatcaagctcacatggattagctttctctcctacgcactgactggtgcgttggttattgtcaccgggatggtgatgggaaatatcgccgattatttcaatctgcctgtttccagtatgagtaataccttcaccttcctcaacgccggcattttaatctctatcttcctcaacgcctggctgatggaaatcgtcccgttgaaaacgcagttacgttttggctttctcctgatggtgctggcggttgccggtttgatgttcagccacagcctggcgctgttctcggcggcgatgttcattctcggggtggtcagcggcatcaccatgtcgattggtacattcctggtaacacaaatgtatgaagggcgtcagcgcggttcccgcctgttatttaccgactccttcttcagtatggctgggatgattttcccaatgatcgccgcgtttctactggcgcgcagcattgagtggtactgggtttatgcctgcatcgggctggtgtatgtcgctatttttattctgaccttcggctgtgagttcccggcgctgggcaaacatgcgccaaaaacggatgctccggtagagaaagaaaagtgggggatcggcgtactgtttctctctgttgcggcgttgtgctacatcctcggtcagttaggttttatctcctgggtgcctgagtatgccaaaggcctgggcatgagcctgaacgacgcgggcacgctggtgagtaacttctggatgtcatacatggtcggcatgtgggcgttcagctttattcttcgcttctttgatttgcaacgcattctgaccgtactggctggtctggctgcgattctgatgtacgtctttaacaccggaacaccagcacatatggcgtggtcaattctcgctctgggcttcttctccagcgcgatctataccaccatcatcaccctgggttcacagcagaccaaagtaccgtcgccaaaactggttaactttgtcctgacctgcggaaccatcggtactatgttgacctttgtggttaccggcccgatcgttgaacatagcggtccgcaggcggcactgcttacagcaaacggtctgtacgctgtcgtctttgtgatgtgcttcctgttaggtttcgtcagccgtcaccgtcagcataacaccctgacctctcattaattgctcatgccggacggcactatcgtcgtccggccttttcctctcttcccccgctacgtgcatctatttctataaacccgctcattttgtctattttttgcacaaacatgaaatatcagacaattccgtgacttaagaaaatttatacaaatcagcaatatacccattaaggagtatataaaggtgaatttgatttacatcaataagcggggttgctgaatcgttaaggtaggcggtaatagaaaagaaatcgaggcaaaaatgagcaaagtcagactcgcaattatcggtaacggtatggtcggccatcgctttatcgaagatcttcttgataaatctgatgcggccaactttgatattaccgttttctgtgaagaaccgcgcatcgcttatgaccgcgtacacctctcgtcttacttctctcaccacaccgccgaagagctgtcgctggtgcgcgaaggcttctacgagaaacacggcatcaaagttctggtcggcgaacgcgctatcaccatcaaccgtcaggagaaggtgattcactccagcgccggacgtaccgttttttatgacaagctgatcatggcaaccggttcctacccgtggatcccgccaatcaaaggttctgatactcaggactgctttgtctatcgcactattgaagacctcaacgccattgaatcctgcgcccgtcgcagcaaacgcggtgccgttgttggtggcggcctgttaggtctggaagccgcaggcgcgctgaaaaacttaggtattgaaacccacgttatcgaatttgcccctatgctgatggcagaacagcttgatcagatgggcggcgagcagctgcgtcgcaaaatcgaaagtatgggcgtgcgcgttcacaccagcaaaaacacccttgagattgtgcaggaaggtgttgaagcgcgtaaaaccatgcgttttgccgacggcagcgaactggaagtcgactttatcgtcttctctaccggtatccgtccgcgcgataagctggcaacccagtgtggtctggacgttgctccgcgtgggggtattgtcattaatgattcctgccagacttccgatccggatatctacgccatcggtgaatgcgcaagctggaacaaccgtgtatttggtctggtagcacctggctacaaaatggcgcaggtcgccgttgaccatattctcggtagcgaaaacgcctttgaaggtgctgaccttagcgccaagctgaaactgctgggcgtagacgtaggcggtattggtgatgcgcacggtcgcacgcctggcgcacgtagctacgtttacctcgacgaaagtaaagagatctacaaacgcctgattgtcagcgaagacaacaaaaccctgctcggtgcggtactggtgggcgataccagcgactacggtaacctgctgcaactggtgctgaacgctatcgaactgccggaaaacccggattccctgatcctgccagcacactcgggtagcggcaagccgtctatcggtgttgataaactgccggacagcgcgcaaatctgctcctgcttcgacgtcaccaaaggtgatctgattgctgccatcaacaaaggctgccacacagttgcggcgctgaaagctgaaaccaaagcgggtactggctgcggtggctgtatcccgctggtcactcaggtactgaacgcggaactggcgaaacagggcatcgaagttaacaacaacctgtgcgaacactttgcttattcgcgtcaggaactgttccatttgatccgcgttgaaggcattaaaaccttcgaagaactgctggcgaaacacggcaaaggctacggttgtgaagtttgtaaaccaaccgtcggttcgctgctggcctcctgctggaacgaatacattctgaagccggaacatactccgctgcaggattctaacgacaacttcctcgctaacatccagaaagacggcacctactcggtgatcccgcgttctccgggcggtgaaatcaccccggaagggctgatggcggtaggtcgtatcgcgcgtgaatttaatctctacaccaagatcactggctcccagcgtctggcgatgtttggcgcacagaaagacgatctgccggagatctggcgtcagctgattgaagccggcttcgaaaccggtcatgcctatgcgaaagcactgcgtatggcgaaaacctgcgtgggtagcacctggtgccgctacggcgttggcgacagcgtcggcctcggcgtggaactggaaaaccgctacaaaggcatccgtacgccgcacaaaatgaagttcggtgtctccggctgtacccgtgaatgttcagaagctcagggtaaagacgtgggtattatcgccactgaaaaaggctggaacctgtatgtttgcggtaacggcggcatgaaaccgcgtcatgcggatctgctggcggcggatatcgatcgcgaaacgctgatcaaatatctcgaccgcttcatgatgttctacatccgtactgccgacaaactgacgcgtaccgcaccgtggttagaaaacctcgaaggcggcatcgattacctgaaagcagtgatcattgacgacaaactggggctgaacgcacatctggaagaagagatggcgcgcctgcgtgaagcggtactgtgtgagtggactgaaacggtcaatacgccgtctgcgcagactcgcttcaaacacttcatcaacagcgacaagcgtgacccgaacgtgcagatggtgccagagcgcgaacagcaccgtccggcaacgccgtatgaacgtatcccagtaactctggtggaggacaacgcatgagccagtggaaagacatctgcaaaatcgatgacatcctgcctgaaaccggcgtctgcgcgctgttaggtgacgagcaggtcgcgattttccgcccgtatcacagcgatcaggtgtttgcgatcagcaacatcgacccgttcttcgagtccagcgtgctgtcacgcggactgattgcggaacaccagggcgagctgtgggtcgccagcccgctgaaaaaacagcgttttcgcttaagcgacggcttgtgcatggaagacgaacagttttccgtcaaacattacgaagcgcgagtgaaagacggcgtggtgcagctgcgcggttaatgttttaacgggaggcgcaatgcctcccctttttgcatggtcctgtaataatcttcggtatattgcaggacattttttaaactttttgttttattttttgtttttattttttaaaggataatcaaatgtttacagacactattaataagtgtgcggctaacgctgcgcgcattgcacgcctgtcggcaaataacccgctcggcttttgggtcagctccgccatggcgggcgcgtatgtgggtcttgggatcatcctgattttcacgctcggtaatttgctcgatccatccgtacgccctttggtgatgggcgcgacctttggtatcgccttaacgctggtgattatcgccggttctgaactgttcaccggacacaccatgttcctcacctttggggtaaaagcgggcagcatcagccacgggcaaatgtgggcaatcctgccgcaaacctggctgggtaacctggtcggttccgtcttcgttgccatgctctatagctggggcggcggtagcctgctgccggtagataccagcatcgttcactccgtcgcgctggctaaaaccactgcaccggcaatggtactcttcttcaaaggtgcattgtgtaactggctggtttgcctggcaatctggatggcgctgcgcactgaaggggcggcgaaatttatcgctatctggtggtgtctgctggcatttatcgcgtccggctacgagcactctatcgctaacatgacgctgttcgcgctctcctggttcggcaaccacagcgaagcctacacgctggcgggtattggtcataacctgctgtgggtgacgctgggtaatactttatcaggtgccgtattcatgggattgggttattggtatgctacgccgaaagcgaatcgtccggttgcggacaaatttaatcaaactgaaacggctgccggttaattactaaggggtttttacgtggatcatttgcctatattttgccaattacgcgatcgcgactgtctgattgtcggcggtggtgatgtcgcggaacgcaaagcaaggttgctgttagacgcaggcgctcgcttaacggtgaatgcattagcgtttattccacagttcaccgcatgggcagatgcaggcatgttaaccctcgtcgaagggccatttgatgaaagccttctcgacacctgctggctggcgattgcagcgacggatgatgacgcgcttaaccagcgcgtcagcgaagccgctgaagctcgtcgcatcttctgtaacgtggtcgatgcgccgaaagccgccagctttattatgccgtcgattattgaccgctcaccgctcatggtagcggtctcctctggcggcacctctccggttctggcacgcctgttgcgcgaaaaacttgaatcactgctgccgttacatctgggccaggtagcgaaatacgccgggcaattacgcgggcgagtgaaacaacagttcgccacgatgggtgagcgtcgccgtttctgggagaaattgttcgttaacgaccgcctggcgcagtcgctggcaaacaacgatcagaaagccattactgaaacgaccgaacagttaatcaacgaaccgctcgaccatcgcggtgaagtggtgctggttggtgcaggtccgggcgatgccgggctgctgacactgaaaggactgcaacaaattcagcaggcagatgtggtggtctacgaccgtctggtttctgacgatattatgaatctggtacgccgcgatgcggaccgtgttttcgtcggcaaacgcgcgggataccactgcgtaccccaggaagagattaaccagatcctgctgcgggaagcgcaaaaaggcaaacgcgtggtgcggctgaaaggtggcgatccgtttatttttggccgtggtggcgaagagctggaaacactgtgcaacgcgggtattccgttctcggtggttccgggtattaccgcagcttctggttgctctgcctattcgggtattccactcacgcatcgcgattatgcccagagcgtacgcttaattaccggacacttaaaaaccggtggcgagctggactgggaaaacctggcggcagaaaaacagacgctggtgttctatatggggttgaatcaggccgcgactattcagcaaaagctgattgaacacggaatgccaggcgaaatgccggtggcaattgtcgaaaacggtacggcagtcacgcagcgcgtgattgacggtacgctcacacagctgggagaactggcgcagcaaatgaacagtccatcgctaattattattggtcgggttgttggcctgcgcgataaactgaactggttctccaaccattaatttaacccgggccagagaattctggccttcttaatgactctttttatatattcagcaaataaaacatagccccttaataaatattatctgctaatgggttatattcaccgttacagcgacttacaaaattaagtcattcgctcactgacgccaattaaatattcctgtatcgttcttaacgagcagtctgcttatattcatataatcaatgaatattaattaatatataatacatagggaatgtaaatgaacaaatttattaaagttgcactggtaggtgcagtactggctacgttaactgcatgtactggtcatattgaaaaccgtgataagaactgctcttacgactacctgctgcacccggcaatttctatttctaaaatcattggcggttgcggtcctactgcacagtaagtctctgacagaaatcggctaacaccggtttaattgcccgacgccctctggattttccgagggcgtatttgtttctatgtccttcttgcccccgcccgtaaaaatattttcactttaaattcaatttgataactacatccattagccacagcgcgatcctgtgcgaaattttgtgatcttcctccacattacataacatcatatgttgttatattcatcatgcattgtcatgttaccttttaaatgactgcaaactctcccctacaacgtattggacaagaaaaaggtatcgctatgggaagccaggaactccaacgcaagctcggattttgggccgttcttgcaatcgccgtcgggacaaccgtcggctccggtatttttgtatctgtgggtgaagtggcaaaagcagcgggcacgccgtggcttacggtgctcgcgtttgtcattggcgggttaattgtgatcccgcaaatgtgcgtctatgcggaactatccaccgcttatccggaaaatggcgcagattatgtttatctgaaaaatgccggaagccgaccgctggctttcctctccggctgggccagcttctgggccaacgatgcgccgtcattgtcgattatggcgctggcgattgtcagcaatcttggctttttaacgcctatcgatccgttgctcggtaaatttatcgccgccggattaattatcgcctttatgttgctacacctgcgctccgttgaaggcggcgcagcgtttcagacgctaattaccatcgccaaaattatcccgttcactatcgtcattggccttgggatcttctggtttaaagcggagaattttgccgcccctaccaccactgcgattggcgcaacgggcagctttatggcgctgctggcggggatctctgccaccagttggtcgtataccggcatggcctctatctgttatatgaccggcgaaattaaaaaccccggaaaaaccatgccacgagcgctgattggttcctgtctgctggttctggtgctctacaccctgctggcgctggtgatttccggcctgatgcccttcgacaaactcgccaattctgaaacgccgatttccgacgccctgacctggatccccgcactcggcagcaccgctgggatctttgttgccatcacggcgatgatcgtcattcttggttcgctttccagctgcgtgatgtaccagccgcggctggaatacgcgatggcgaaagacaacctgttctttaaatgcttcggccatgtgcatccgaaatacaacacgccggatgtctccatcatcctgcaaggggcgctggggatcttcttcatcttcgtttccgatctcaccagcctgctgggttatttcaccctggtgatgtgtttcaaaaataccctcaccttcggctccatcatctggtgtcgtaaacgcgacgattacaaaccgctgtggcgtactccggctttcgggctgatgaccaccctcgccattgcgtcaagcctcattctggtcgcctcaacctttgtctgggcaccgattcccggccttatctgcgccgtcatcgttattgctactggtctgcctgcttacgccttctgggcgaagcgtagccgccagctcaacgctttgtcgtaatgttatctggagaaaataaaatgttggatattgataaaagcaccgtggactttctggtcaccgaaaatatggttcaggaagtggaaaaagttctcagccatgacgttccgctggtgcacgccatcgtggaagagatggtgaagcgcgacattgatcgtatttatttcgttgcctgcggatcgccactcaacgcggcgcaaacggcgaaacatctggcggatcgcttttccgatcttcaggtctacgccatttccggctgggagttctgcgataacaccccgtatcgcctcgacgatcgttgcgcagtaattggcgtttctgactacggtaaaaccgaagaggtaatcaaagcgctggagctgggccgggcctgcggcgcactcactgcggcgttcaccaaacgcgcggatagcccgattacctcggcggcggaatttagcattgattatcaggccgactgtatctgggaaattcacctgctgctctgctacagcgtggtgctggagatgatcacccgcctcgcgccgaacgcggaaatcggcaagatcaaaaacgatctcaagcagttgccgaatgcgctcggtcatctggtacgcacctgggaagaaaaaggccgccagcttggtgaactggccagccagtggccgatgatttataccgttgctgcgggtccgctgcgtccgctgggttacaaagaaggcattgtaacgctgatggaatttacctggacgcacggctgcgtgattgagagcggagagttccgccatggcccgctggagattgtcgaaccgggcgttccgttcctgttcctgctcggcaatgatgaaagtcgccacaccaccgaacgcgccattaactttgttaaacagcgtactgacaacgtgatcgtcatcgattacgccgaaatttcgcaagggctgcacccgtggctggcaccgttcctgatgttcgtgccaatggagtggctctgctactacctgtctatttacaaagatcacaacccggatgaacgccgctattacggtggtctggtggaatattaatccctctcccggcccggcaacgggccggatttacgcaaggagttacccgatgaaaacaggtatgtttacctgcggccaccagcggctgcctattgaacacgcatttcgtgatgcaagcgagctgggttacgacggcatcgaaatttggggcggtcgcccgcacgcgttcgcgccggacttaaaagcgggcggcatcaaacaaatcaaggcgctggcgcagacgtatcagatgccgattatcggctatacgccagaaaccaacggctatccgtataacatgatgctgggcgatgaacatatgcgtcgcgaaagcctcgacatgatcaagctggcgatggatatggcaaaagagatgaacgcgggttatacgctgatttccgcggcccacgcgggctatctcacgccacctaatgttatctggggacggctggcagagaacctaagcgaactgtgtgagtacgcggaaaacatcggcatggatctaatcctcgaaccgttaacgccgtatgaatcgaacgtcgtgtgtaatgctaatgatgtgcttcatgcgctggcgctggtgccttcgccgcgcctgttcagcatggtcgacatttgcgcgccgtatgtccaggcggaaccggtgatgagttatttcgacaaactgggcgataaattacgtcatctgcatattgtcgacagcgacggggccagcgacacgcattacattcctggagaaggcaaaatgccgctgcgggaactgatgcgcgatattattgagcggggctatgagggttactgtacggtggagctggtgacgatgtatatgaacgagcccagactctatgcccgccaggcgctggaacgctttcgcgcgctgctgccggaggatgagagatgaaaaccctggcgacaatcggcgataactgcgtcgatatctacccgcaactgaataaagcgttttctggcggtaatgcggtcaatgtggcggtgtactgcactcgctacggcatacagccgggatgcattacctgggtgggtgacgatgactacggcacaaagctgaagcaggatctcgcccgcatgggcgtcgatatcagccatgtccatacgaaacacggcgttaccgcacaaactcaggtggaactgcacgacaatgatcgcgtttttggcgactacaccgaaggcgtgatggccgactttgccctgagtgaagaggattacgcctggctggcgcagtatgacattgtgcacgcggcaatctggggacatgcggaagacgcattcccacagctgcacgctgcgggcaaacttaccgctttcgacttctccgacaagtgggacagcccgctctggcagacactggtgccgcatctcgattttgcctttgcctccgcaccgcaagaagacgaaacgctgcgtctgaagatgaaagcgattgttgcccgtggcgcaggaacagtgattgtcacgctgggtgaaaacggcagcattgcctgggatggcgcgcagttctggcgtcaggctcctgaaccggtgacggttatcgacaccatgggtgccggagattcgttcattgccggattcctttgcggctggtctgcggggatgacattaccgcaggcgatagcgcagggaacggcgtgcgcggcgaaaaccattcagtaccacggtgcctggtaggtataacgttggcgtgagcatcttcacgccaacgtgctgttacttgccggaaaacgaccctataatccgagtaattcattctttatttcagggtcgattatgtcagctacggaccgctactctcatcaactcctctacgctaccgtccgccagcgactgctggatgatatcgcgcagggggtttaccaggccgggcaacagatccctaccgaaaacgagctttgtacacaatataacgtcagccgcattaccattcgcaaagccatcagcgacttagtggcagacggcgtactgatccgctggcagggaaaaggcacctttgtacaaagccagaaagttgaaaacgccctgcttactgtcagtggttttaccgattttggcgtctcacaaggcaaggcgacgaaagagaaagtgatcgaacaggaacgggtcagcgccgcgccgttttgcgaaaagctgaacatccccggaaacagcgaagtgttccatctctgccgggtgatgtatctcgataaagagccgctgtttattgatagttcatggatcccgctgtcgcgttatcctgactttgatgagatttacgtcgaaggaagctccacctatcagttatttcaggagcgttttgacacgcgagtggtcagcgacaaaaagaccatcgatatctttgccgccacccgcccgcaggcaaaatggctgaaatgcgaactgggcgaaccgttgtttcgcatcagcaaaatcgcctttgatcagaatgacaaaccggtgcacgtctccgaactcttctgccgcgccaatcgcatcaccttaactattgataataaaagacattaaccgtaggccggataagatgcgccagcatcgcatccggcgatgctggcgcgttgaattttacatcccgtacgttcccctcaccctaaccctctccccaaaggggcgaggggaccgttcagtacggaatttagcttgacggtgctatccagcattaaatactggcaatactctcacgcaaaatccgcagcaccgtctcttcaccgctgcgattcgggttaatgcgaatcgcacaatgttctgattgtggattcgcctggcgaaacgttccggaaaggcgataaaagagcggcgggatttcatatttcgactctgcacccaccgggtaaggcaaggcaccgcgcttttgcgcctcttccagcactctggcggcaatcggctgatgaaactcgacaatcaacaccttcgactgcgcattagcaatcaccgcgcttttcacttccggcaccgcaccaccgttaagcaaagccagcaaccgttcagatacccctgcctgcaccgcgtgcatcactggcgcaaacaccagaccacgcaatacttccagcgcctgtgcgccctggatctggctaccgccggagtaaagcgtggcgcgaatacggttgataacatcagcatcgccgaccactgcaccaacaccctctggcccaaatagcttgaagcaggaaaatgtcgagacattcgcgccgcattcacagccgattcgagccaccttcatcaccgcatagttgtcatcggttaacgctggaacacctgccgcgcgcaacgttgccagcacatctgccagcacgtagctgtcctgcggctgctggcgcgtatgctgcaccagcgccgcatccggttgttgctcgtcgacgacctgcttcagtgccgacaggtcattgaaatcaacagtaataagcgtcagccccatctgctcaataataacccgtgtcgtcgggtaaacaggcgcgtcatgcaccagaagacgctgccccggtttgagcaaagccgccagcccggcgcgaatcgcgccagtccccgcgccctgcaccagcgccgcagcctgtgcgtgaaatgcatcagccagcacctgttccacacgctgggtaacgcgcggttgattcagtcctggcgttaagcctaaatcaccgccagtaagaaactcgctgccggggaaatggcgacaaatgctatccaccagcgcaaactgcttttgctgcgcctcaataatcgtcaggctttgcagaggaaacgtcttcataggtgccttccttaagccggaacgaacaggccaagccagtaaagaacattcagcagaataccggtgatcattactgccacgaccggtgccgccattttctgtaccggacggcccagggattcgttgaggaagtaaatggcaaccgcgatagagaatccggtataacccgccatcttaattgctgcgaaaatcgaaccgaccagcagcgccacttccatcagcatattcatggcgttacggatgttatccgacgcattacgcaccgacgggtagcgtcccagccatttgccgatcgaacgaagcagcaagacttccgccgaaataaccactgcgcctaataccgctgcaaccatcggattcggcgagagatagtccaccgcataaacaaaggtaaagcccgcaactgcatacacacccgttgctaacgcggtggtggcaatcaacggcacaaaccccagtccgcgcataaattctgccagagccgcctgattaatcagcgtttgcgattgttccggcgttacgcctgcggaatatgctttctccagtgtgaagatcgacacttcactgccagcaaaaatcttcatgctggcaacggcggcaatcaatgctcccacgatggcgatatagggtaagtttttgataatccgtgacgtgcgttcttcaaacaccgaaagcccgctggcatcaatgtcattttcatcacgatgacgcaggtcgtgagttatcgcgatccccagcagcatcaccatgccaataaagatttcgatggattcagggttaagatgtgggaaatagcgcacgactaccacacgggtcatcagtaccaccacggcggcgatcagactttgcttccagccaaactggtagaaaatcgccaccagcgggaacagtgcaaaagctgaaaccaccggcgagcttaattcccccaggctacctaatacatccaccggcagcgcggtcagcagctggtttactggcaacaggcaagtaaggatcaacacgccccagatagcgccaagaccaaacgccatcaggctgtttatcgccaggacgccgaggatatcggtaggaagaaagagtaaccatgcgttgagcagcccggttttcagggtaaaagagatccccaccgaggccacaaaaccaatgctcagaccaaaagcgatactccccgcctcgcgacggttcatatagccttcaatcagttgcggcaggatcgggcggatgccgtcatgaaaaacagccgccgagcgatgcgccagaagcgatgtcatacccgtcaggcacgccaccacgataatctgaatatacagatccatagtcgtgccttttatttcagatggttaatcagcatcggaatcgcgtgttcgacgtgctcaacggaaaggccaaacgccacttttccttcagcgatcattttggcgatatgctcgtctttcgctttaatgcctggtttggcaatggtgcaacttttgttatagcctatcaccgcgatggcaatcgacaatgccgcgcccgcaccggtattacacgcgccgatgtaataatccagttgcccggatttcaccttcattgccgcttccatgtcgttgtgaatgaaaacttcaaaacagccaggagccgtcgcttcaatagtttttttaatctgctcacgctgtaagcctgcaacgccaatctttttcatgagtctgtccttattggaaaaattgagagggattttcacgtaacatcacatccacatcggcctgactgaatcctgactggcgcaattgcggaataaaggtggttagtaaatagtcatagccataaccaccgttggcttttaaatgggagcggcgcgtaatatccatcgacagcatgacgcggttcagcaacccacggtcgcgtagcgcatgaagcatcgcaatacgcttttcgtccgggtagtaactgttcttgccgatggtgtcgaactgcacgtacgcgccgagatcgatcatcttcaaaatgttgtcgaggttgtctttcagatcgcagtgaccaacggtgacgcgcgaaagatcaaccccgtgggcttgtagcaacgccagttgctccagccccatcgtgctgaacgacgtatgcgtggagatcgggcgtccggtctggttatgcgccagcgcagcggcaataaataccttctcttccagcggcgtaatctttccttcgctggtgccgatctccgcgatgatcccggctttcagctccgtgccatcgataccctgttcaatttcatcgaccatctcctgcgccagttcctgcacgctgcgggtcgccacatgttccgggaaaaacgcgtcctggtaataaccggtacaggccaccacgttgatccccgtctcgcgcattacatcaagcataaattgcgcattgcgccccatgtaacggttggtcatctcaatcacattacgcacgccccgggtcatcaggtcgttcatctcctggcaaatgaacgcatactgatcaaggcggcagtccacgttgtttttaaagccggagagatcaatatgcagatgctcatgggcgagggtgtaacccgtcggatcaaaactcatagggtgtctcctgcaaaccggagggaggaaagaaaagagcgaccattttgtggcggtggcgcgcggaaaaattcacacacggtagcccccacatcagaaagcgtggtgcgcacaccgagctgcgtagcgatcatcccttgctgataaaccagcactggcaccacttcgcgggtatggtggctgtgaccaatggtcggatcgttgccgtgatccgccatcacgaccaggcaatcatctggctgcatcgcctcaacaagccgggcaaggttacggtcaacgacctgcaaacgttcggcataacgtgcgacgtcttctgcatgaccagcgaggtcggtttcctgaatgttggtgcaaataaacgccgtcggatgggtgttaaattcgttgagggtgatatccataatccgctggctatccaccagattttgccagctcacgccataaggattgttgacgatatctgccaccttacccaccagcacggttggcacgcctgcttcatacagtttttgtggcacctgcactttttcatcgacgccatagcccatatgcacgacctggaaaccgttgtcataagcgccagaacgcggcgcattgataccaataaagcgcccttctttgctttctgcggcatcgagaatgcgttgactgtcggttaacaggccaccaaatgtaatgacccgaccgacctgtacctgctcacgcacgatacgaccaattttgattgcgtcgtcaaaagagatcacagagagattggcggtaatgttatagacctggcctaaatccgcctcgagattatcgccaatcgcaaccgcctgattgacccacagaaattgcagatcatcgccacggcgctccacctgccagccagcggaaactaatgcctgctcaacacggtcaatcacatcgcgaaaaggcatccgcagcggcggtaacgggcgcgtgcctaaaatttcctgatgccccataaaggtatcgccaccttcatgttgcagctctgccacgccccaggttgcggaatctgacggctgcatatcgcctggcgcataacccaatgcgttgattagccccagcgtctccagcgttggtagctgcaaatgcggcaactggctcaggatgtgaccacatgtattcgctcccgcatcttgcggacgcaccagcgtgacatctttcattgcccctacgccaaagctatcaatcactaacaccacaaatcgcgccattacgcccccagagagtttccaagactgtcataacgaccgacgatttccggttcgccacgatgaataccggacaccagcaccacatcgctacgggtgacaaaaatctgcgtgcgaaaacagagcaccactgcactgcttaccggaaactcgcctgccagcggcagggtgtagtcgatactgctgtcatccacagttttgagattggtttcagtaatcttttgattttctggcgtaaacaccaacgcatgttgcgcatgaccacgacgatagtaaccgccgccgtagcagtagctgtcgccacggaaatgatgggagatttcacttaaccagagcatcgcgatacgttcaggctgatcgccctgctggtttgccggaatagtgcccgtcagcgcatgaccgggttcggcatgagtcacaccgtattgcgccagtaatggcagcgaagtgcagctggtcgctgaaggcgcgttcagttgctcaagtgcaataccagatttcgccagttgatcccgtgcctgtatcagcgtgtgaagattcggtgtcggcaaaacttttccgacagcctcatcccaaagcaggcaagggaaatgggtaagtccggctaaatgcagccctggcagattctggatttcggcgacaatctccggcaacaccttgagggcaaaaccgctctcctggcccggataaagaaaatcatcgtcgctataaactttaagcagcacagactggattcgcccggccttcaccgccgccgcagaaacttcccgcgctttgtcgagagtaaacacggtgatgacgtcggtgccctgttcaacggcgtcagcaacctgatgacaagggatttgtaccagatgcccctgatgcgccacaggcaaaccagcgcggcgcatgactcgcgcctctttgtaatccaccgccacaatgccgctgtagcctaatgccagcaatttttccgccagccacggattacgaccaaactgcttggtcatcagatacagttcaatgccgtaaagccgcgccgtctcaatcagccgcttaccgttttccagtatctgatccacgtcgatcacccagctgtccggggcgatcttgccctgctgccacaggcttagtgcggcggaaatcagcgccgggttctggcgtttcaatgcttctacaaacatcttgttgcctcgtttctgttccttgaattaaatattcatttttttgaatatttaggttgtgcgacgtggatttgtcgggagcttcaaacctcttcgttagcagccatccataatccataaaggttggccagcaaatagccttcttcacacgggttaacttccagtgcgaattccttcaacaacacctgatgcaattgcacaacggcttgccagtggctggattgcgccagttctgccagcaactcgttatccagcggctctatttcttcaccacggcgactgcgcatcagtgcactcgccatatgtgtcatcgccatcgttccttgctcactgcgcaccggcagatggcactctgtttccagtacgttgacgacctgcatcatgcctttgcagatgtccttatcaataacgcctgcctcgcaaagcaggttgagtctggtttccatatcagatgcctttcgtttaataactcggttcctgttccccactcactacccgttgttgatgggcgagcagggcgtgtttatctacaacggcacgcagcagttgttgcattgggtaatcatcgactcgcgtcaggaccacggcttcggtggcctgtaaaaatcgcggatcgtctgtgagcggcgtcgcctctaatcccagcatggtcagttcgttttccgccaccacgttccagatcaccgcatcgacatcgcctttaacaatgcgttgtaaactctcgtgataagagagatcgactcgttccacatcactaccgccaaaaaaaacatcggtcatgattttctgatccgccgaacggttatccagccccacgcgcttcacgtttgcggactcgcctttacggcaaatcaactggtgctcgccaacgtaggtgtgcggccccaactccagcgcgaggcataagcctttttgcgtgagataactttccgccgctagtcgcgaaaccaccgccatgtcatacacgccattaagcagacactccacgcgaatatccgcgccacgcatgtgcgcatagtaaaaaggaatgccatcaaactgggctttcaatccgctcgccaggccttcgtacaaacgggtatagggcaagggcattgcacataccacgttgttgatatccacatgagtcagcaatgctttgttatccatctcgaccagataactgccattgcgcccacggcgttcaatccgtatcgctccgcttgattccagcgttttcaacgcggcctgcgtcaggccaacggatgaacggcattcatttgccagctcatctatggttttcaatcgattaccgcacttttcacccaacaaataacgggccagcgtcgtgatgacgacgccttcttttttgataaacgttcgacgcataataaattttcagtaaattgaatatttatatcttcaggaatttgaagataaggcgcaacagcgagatgtggaaacggcgaggcacttcacattttttcggattattgcaaatgaggataaaaaaaccgggtttccccggtttcagagtgatgataaaagcaaaattgcctgatgcgctacgcttatcaggcctacatttccttgcaatatgtgcattactttgtaggccggataaggcgttcacgccgcatccggcatgaacaaagcgcaatttgccagcaatagtgaattacggcttcgccacaaaaccaatcgcttcgtacaccgcttttagcgtacgggaagcgtgcgcgctggctttttccgcgccatctttcatcacctgttgcaggaaggcttcatcgttgcggaaacggtgatagcgttcctgcaattcagtcagcataccggaaacggcatcagccacttcacctttcagatgaccatacatcttgccttcgaactgtttttccagttctgggatgctctggcccgttaccgctgaaaggatatccaacaggttggaaacgcccgctttgttctgcacatcgtagcgaactaccggcggctcgtcggagtcagtgaccgcacgtttgattttcttcactaccgatttcggatcttccagcaggccgataacgttattgcgattatcgtcagacttggacatcttcttggtcggctccagcagcgacattacgcgcgcgccagatttcggaataaacggctccggcaccttaaagatctcgccatacagcgcgttgaaacgctgggcaatatcgcggctcagttcgaggtgctgtttctggtcttcacccaccggtaccagattagtttgatacagcaggatgtccgctgccatcagcaccggatagtcaaacagaccagcgttgatgttctcggcataacgcgcagatttatctttaaactgcgtcatgcgactcagttcgccgaagtaggtatagcagttcagtgcccagcctaactgtgcatgttccggcacgtgggactgaacaaaaatggtgcttttctcaggatcgataccacaagccagatacaaggccagcgtatccagcgtcgctttacgcagcttctgtgcatcctggcgcacggtgatcgcgtgttggtcaacgatacagtaaatgcaatggtagtcatcctgcatgtttacccactgacgcagcgcacccatgtagttaccaatggtcaattcacctgagggctgtgcgccactaaaaacgatgggcttagtcatttttcgattcctgattttcgctatgcggaagccctaatgcgggcagaaggtcatttatagactgataaattacatcaggctggctgagatcgatagcctcgccgtagttatatccgtaggttaagccaactgatgggcaacctgccgcttttgccgcctgaatatcattgcgtgagtcgccgacaaacagcatctgttgtggggcaattcccatccgctcagccaccagtaacagcgggtccggatgcggttttttgttttgcacatcatcaccaccaatcaccacgctgaagtatttggcgatatctaaggcttcgagcagcggcgcgacgaacggcgtcggtttgttggtgaccaggcctagcggcaggcctttagcctgcaacgcgcccaacgtatcggcaacgtgcgggaacaaaaacgtcccctcttcggcaacctcgccatagtagcgatcgaacagtttacgcagaatacgtacctgttcttctgccggaatgtcgtcatcaacgggcggtttacccattgttttacgctgagtcgcacgttcctgacgcgcccaggtcaatgcgcgctccatcagaacatctgcgccgttaccaatccaggtaataacgcgttcttcacctgcgacgggcaactccagcgcatacagcgccatatctaccgcagcagcaagaccaggagcactgtcgaccagcgtaccatcaagatcaaaagcgacgccgcgaatatcttcaaacttattcatgacttacctttgccagttcactgcgcatttcatcaatgacttttttgtagtctggctggtcgaagattgccgaaccggcgacgaacatatccgcgcccgccgcagcgatttcgccaatgttgttcaccttcacgccaccgtccacttctagtcgaatgtcaaagccagactcgtcgatacggcgacgtacttcgcgcagtttatccagtgtttgaggaatgaaagactgaccgccgaaaccagggttgacggacatcagcaggatcacatccagcttatccatcacgtaatccagatagctcagaggtgtcgccgggttaaataccagacccgctttacagccattttctttaatcagttgcagcgtgcggtcaacatgctcggaggcttctggatgaaaggtaatgatgctggcaccagcggcagcgaaatcaggcacaatgcgatcgacgggtttcaccatcaggtgtacgtcgataggggcggtaatgccatagttacgcaaggatttcagcaccattggcccaatcgtcagattgggaacatagtggttatccatgacgtcaaaatgcacgacatcagcgccagctgccagggcttttgcggtatcttcacccaggcgggcaaaatcagccgacagaattgagggggcaatcaaatactgtttcatccgcttctccttgagaattattttttcgcgggtgaaacgactcctggtttgtacaaagccagcagttcgtccacctttttacgtgtgccgccgttgctgcttatactgcgtcgaactttgacgacatgcaattttgcgcgctgataccactcacgcgttaacatcgtatcgtgattggagatcagcactggaatatggcgctcaaccagaccttcggcgatctccgccagatgcgcttgttgttcaagcgtaaaactgtttgtgtgatacgccgtaaagttggcggtcgcagacagcggtgcataaggcggatcgcaatagacgacggatgcatcatctgcgcgcgccatgctatcggcgtaagactcacaatagaaaaaggcattctgcgctttttcagcgaagtgatacaactctgcttccgggaaatagggttttttgtagcggccgaacggcacgttaaactcaccgcgcagattgtaacgacacaggccgttgtaaccgtagcggttcaaatataaaaacagtaccgcccgacggaacggatcctggcttttgttgaactcttcgcggaactgatagtaaacctcggcgcaatttgtttcgggaacaaacagctcgcgtgcggcctgtacgtactcatcagtacgcatcttcacaatgttatagagactgatcaggtcgctattgatatcggcaaggatataacgagaaaagtcggtgttgagaaacaccgacccggcacctacaaaaggctcaaccagacattcgcccttgggcaaatgccgtttaatatcatcaagcaggggatacttgccccctgcccacttcaaaaaagcgcgatttttcttcatgctgactaactaattacaccttctccggctgtggagaaagctccgacagcatccagcgcttcaggcaactcccgcaacgataaaccattgcgggagataaccttgattacttcagatcggcctgtacctgacgcagcggtttcgcccacgggtttttggcctggacatctgctggcaatgtagataccgcttttttcgcctcttctttcgaagcgtacacgccagaaaccaggacataccacggctgaccattacgcgtcgtttcatagacaacgtagtttttcagattctctttcttcgcccaaccgttcaggttgtcgtagttagaggaactgctcagctgcagagtgtaatggctggacggtgccgatttcaacgaaccaacattacctgcggtcttcgccccagcagcgggtgttgctgtggtttgcgccggggatgccgtctgtactggagccgtagtcgccgtctcttttggtgctggcgtagaagtcgcagccggtgccttcgtgctcgccacaggggcagctggttcagtacgcttcggcgtctgtgctaccggcttcggctccgttttcacggttgcttgcggttttttcggttcaatcaccgcctgctgacgagctgggcgcgtagtggacggacgttcagcggtttgcgttttcgccgtgtcacgcgatgcattgccattgcgaacaggcgcaaccgttgcgggttcagtcggcaacgtggaattgaccgccacattgttcagctgttgctgattttgtggctgggtcagcgcattgttcaggtcaccctgcacttcaacacgttgttgaccatccgttgccaccggggtttgcccttgagtcggcgtagaagagatcggtggcagagaaacatcctgctgagtattttccgcagacgtggttcccggcgctggctgcacgccattcgcctgatcggtcgcattgccagcaagatcaatactcttctcgccagacgcggtttgatcgctggaagtggtcgagggggcttttagcgcagaaccgataccgatgatcaacagcagtagaaccagaatgccgacgcccatcatcatatactgacgagaagcgggtttactggctgcttttttgcgcttacgcggacgacgctctacgcgctcttcatccacggtttcatcttcggattcgtcaatttcttcttcgatttccggttcctcattgcgctctttttgcgcacgagtcggacggcgatcgtcagtgtcatcaagttcaatatcatcaaaattgatctgcggttcgccacgttcagtacgctcagaacgttcagaagattgacgagaacgaccagtacgacgatcgctgggatcgggtttcagctcgtcttctggtttgaattcatccatttaacaccccactaaaaggttaatgcttaccacgttgcaattaacctgaagctaatagaccgcttgataagcggcctgacctttcttgttgttacgctgattgacaatcggcaatggcgttaagaacaagctcgtgcgaaacgccgctgcgaacttcactcttaccaattgccaacggaagaattaagcgcatctctcccgcaaggactttcttgtcacgcagcatatgcggtaaatacgcctgcgcggacatttcgcgcggcccattgaccggtaacccagcccgcttgagcagggttataatacgctgcgtttcggcagaactaaactgcccgagacgttccgacgtccgcgccgccatcaccatacccgcagcgaccgcttcaccatgtaaccaattgccataccccatttcagcttcaatggcatgaccaaaggtgtgtcccagattcagtaaagcacgtaacccggtttcgcgctcgtcggcggcgacaacttctgccttcagttcacaacaacggcgaatacagtacgccattgccggaccgtccagacgcaacaacgcatccagattctcttccagccagttaaaaaacgcaccgtcaagaataatgccgtatttgatgacttctgccagccccgacgctaactcacgcgggggaagcgttttcagacagtcgagatccaccaccactgaagcaggttggtagaacgcgccaatcatgtttttaccgaggggatggttgaccgcagttttgccgccaacggaggaatcgacctgcgacagtaacgtcgtcgggacttgaatgaaacggacaccgcgctgataactcgccgccgcgaagccggtcagatcgcccactacgccgccgccaagcgccaccagcgtagtatcgcgaccatgcggtttttgtaacaacgccgtaaagacggtatcgagtacagccaggcttttatactgctcgccgtcagggaggataacgctatcgacgttaacacccgcctgttcaagtacgccgcggaccttatcgagatacagaggagccagggtttcgttggtgaccaacatgacctgctcgcccgatttcagcggtaagaatgaagctggttcattaaacaaaccagatgcgatggtaattgggtaactacgttccccgagagtaacgacaatcctctccataacgcgacatccaccttaattactgtacccgcagacgagtgtatataaagccagaattagttgctttccagcatgtgaataatctggtttgcaaccactttagcgctttgatcatcagtacgaatggtcacgtcggcaatctcttcatacagcggattgcgttcattggccaacgcttccagaacttcacgcggcggtgtttcaacgtgcagcaacgggcgttttttatcacgctgcgtgcgtgcaagttgcttttcgatggtcgtttcaagataaacgacaacgccacgagcggaaagacggttacgcgtttcacgggatttcacagagccgccgccagtagccagcacaataccctgtttctcggtcaactcattgatgaccttttcttcgcgatcgcggaagccttcttcgccttctaaatcgaaaacccagcccacatcagctccggttcgtttctcaatctcttgatcggaatcgtaaaattccatattgagttgttgagctaactggcgcccaatagtgctttttccggcacccataggcccaaccagaaagatattgcgtttctctgccattttttcggtactactaagactattcgttaatgataaacccgcttcgctcagagagcgccgcaggacatgaactgaaacctcataagatattgcgagagtcagactgaaaattatctcaatactccagcgggtttggcaactgaataaatcacccatccctctgcatatctggtcgctgcaagcgcgctgccttgctaccaccgctctggcgataaatcaccgggtaagattagcgtaaaaaagacagcaaaatgccgcctgaatgataaatcatcatcatggaacgcaggcagcgaagagcaccaactctcaaatcggtactccttgtatgctaaatacctgcgcgcgtcaaatagatgaaacacgttcagcgtaaaaacattaccgcttttacggctgtttactcactggaaaccagtcgtggcgtgataaacaccactaactcgcgtcgttcatcttcttttccgtcatgacgaaataattgcccgaaccagggaatgtcgccaagcaacggtacgctatcctgacccgatttatttttacgggtaaaaatgccgcccagcgccaacgtttctccgcttttgacctcgacctgcgtttcgatctcctgcttatcaatcgccagcacttcgccatcggcctgctgtagcacctgccccggaacgttctggctgatgtgtaatttcagccggatgcgacctttttgtaacaccgtgggcgtgacctccatccccaggacggcctctttaaattccaccgacgtcgcgccactttccccgctggaaacctgatatggaatttcgctcccctgtttaatgctggcaggctgaagatgtgaggccagcagacgcggactggcgataatatccagctgctgtttttgttcgagcgcggaaagctcaagatccagcaagcgtccgttgatgcgcccaatgttaaaaccgacatgcgttgtcgccgtcgctacggagaggtcgctaccaagcgtggtgacttgcccaacgccaccagcgtgttgcgcatcggccagcgtccatttcacgcctaactcacgcaaacttttttcattaatggtgacaatatgcgccgacagctcaacctgcccgaccggcagatccatttgcgctacccactgttcaagcgcgcttaacgccgttttgttatctcgtagcaaaaggcgattggtgcgtttatcgacggtcatactccctttggcactcagtagcttctcccccgctttcgccagttctcccgcgtcggcgtattgcagggttatactgcgattttccagcggcagatttgcctgcgcccgcgcctgctccgcctcctggcgggcgatattgttattctgccaggcaatggaatgcactgagagaatgttgccttcctgccgcgttatcagtccggcgcttttcactacagtttgtagtgcctgcttccagggaacatctgttagatgtaacgacaccgtaccgctgacgtctggcgacacgaccaggttcaacttctcctgttcagccagcgcctgcaacacctgagctaccggaacgtcatccaccatcagcgtcactttttgcggctttgccgcctgtacgccgggtatcagcatcaacagtagtgcggctatccattgcttcatttgtatctccttgccgttgccacaaccattgtggcggttcgcagtttgtcccggtacccagcgttagtacgtctggcgtcagctgtaaaattgtccagccgttttccagcacatcgttttgctgcacccgtcgccatttcttttgcccgtcttttattacaccgatgatgcgctcgcctcgccctaccatcccctgatagcgccactggctaagttcgctaatccggcatagatcttccggcggtttaaaagggtcacgcataccggttaaaaggcacaatgcaatacctgccaacaaccagcgtttaaccctcatgcggcgtctccagttgtagcgtgaacaaaagatcatcaccttccacgcttaacgaaaaacggctcacgctgacgttgcgctctgccagccgtgtaaatgccgacggcactgcttcccacagcgttttcaacgccaactcgcctccctgcgcggatggatgccaggaaaccagttgcgcgccggataactgaaaatccagtggcgaaaagggcagcgttttttcctcgctgaagggagcggtgtctaccaggcgatacagtgcggcccactgctggtgatgacttgcccgtagtcgaattaatgcgtcgcgctcttcatggtgtgtcgatgacagaaaaatgagcgtaactaacatcagcaaccagaatgcccagcaaagctggcggaggcggggtgatgtggcgaaccaccagtcaaagaacatgttcatcgctaaccttccttgttaactgatactcaaattgccagcgtccctgcgcatcctgctgcgtggctccccgctgattgagatgaaaagatgcatcctggcggagtgacgtttctagtgcgtttaacgcggtaatgcttgttgtcagccccttgatctccagcgttccctgctgccagcttatcgttgtcagccaggcgtgctcgggtaaaagcgccgccagtgcttccagcgcagattgccagtcgcgggtaaattgtcgctggcgctgccgttgcgaacgctgttcgcgtaactgctgttgctccagcaaacgtggcttcgttatctgtaagctgcgggcgagttgttgttccgcctgaagcaaaactgcgtctatgcgcgcttcggcgctgcctgtcagacgcagtattagcgttatcccgacggccagcagcagaggcgcaacgaacatcagcaaccagaaacgcagaaaagcggtccggcgttgctgtcgccagggcaaaaaattaattggcgggttcatcagtacgccttcccaagcgccagccccagcgcgatggcaaagtctccacctggcggcggtagcggcggctgacgaacagaaacggcctcccagggatcaaatccgccttcgccacatatcgcgacgctttcgggatcaacggataacgctgccgccagctccttcgcgctagtcatccccaccgccagtttgcgcccccagctatagcgcgtcgcccacagccactgttcgttatcacgccaggccagacattgctgatgagaaggtaaaaaaggcaggaatcgctgtaatgcactggcatccggggtgatcgcgctcacatgaacacgcaacctttctgccagagtaagcagcgttgccagctctttgctttgcgcggcagtcacgttataggcgggactgagtgagtcttcgctgtaatcgaagcgcagggagtccggatccatatccagctcgcgggccatcgtccctgacagccaggccgtttgctcccgctcaccaagggacatcgacgggcgcggaaatgaccgctgtaatgtgcgactggcgggaaacgccaacataatgtgatgacgctgcggcagttcgcgactccacggtaacaacgttttagccagctgctgcgcatcaacaatccgcccatctttgataatgtcgttctccagcggcaaccgccaccagcgttgcaaaaagcattcttttgcgccccgcacgatcgcaaccgctaccgcttcttgctgttgtaaatgcaaaccaatttgccagatcttaaatgccattgtgatgatctccttatcacccgtcactctgacgggtatatcaatgcgtctggcttgcctttatactaccgcgcgtttgtttataaactgcccaaatgaaactaaatgggaaatttccagtgaagttcgtaaagtattttttgatccttgcagtctgttgcattctgctgggagcaggctcgatttatggcctataccgctacatcgagccacaactgccggatgtggcgacattaaaagatgttcgcctgcaaattccgatgcagatttacagcgccgatggcgagctgattgctcaatacggtgagaaacgtcgtattccggttacgttggatcaaatcccaccggagatggtgaaagcctttatcgcgacagaagacagccgcttctacgagcatcacggcgttgacccggtggggatcttccgtgcagcaagcgtggcgctgttctccggtcacgcgtcacaaggggcaagtaccattacccagcagctggcgagaaacttcttcctcagtccagaacgcacgctgatgcgtaagattaaggaagtcttcctcgcgattcgcattgaacagctgctgacgaaagacgagatcctcgagctttatctgaacaagatttaccttggttaccgcgcctatggtgtcggtgctgcggcacaagtctatttcggaaaaacggtcgaccaactgacgctgaacgaaatggcggtgatagccgggctgccgaaagcgccttccaccttcaacccgctctactcgatggatcgtgccgtcgcgcggcgtaacgtcgtgctgtcgcggatgctggatgaagggtatatcacccaacaacagttcgatcagacacgcactgaggcgattaacgctaactatcacgcgccggagattgctttctctgcgccgtacctgagcgaaatggtgcgccaggagatgtataaccgttatggcgaaagtgcctatgaagacggttatcgcatttacaccaccatcacccgcaaagtgcagcaggccgcgcagcaggcggtacgtaataacgtgctggactacgacatgcgccacggctatcgcggcccggcaaatgtgctgtggaaagtgggcgagtcggcgtgggataacaacaagattaccgatacgctgaaggcgctgccaacctatggtccgctgctgcctgccgcagtcaccagcgccaatcctcagcaagcgacggcgatgctggcggacgggtcgaccgtcgcattgagtatggaaggcgttcgctgggcgcgtccttaccgttcggatactcagcaaggaccgacgccgcgtaaagtgaccgatgttctgcaaacgggtcagcaaatctgggttcgtcaggttggcgatgcatggtggctggcacaagtgccggaagtgaactcggcgctggtgtcgatcaatccgcaaaacggtgccgttatggcgctggtcggtggctttgatttcaatcagagcaagtttaaccgcgccacccaggcactgcgtcaggtgggttccaacatcaaaccgttcctctacaccgcggcgatggataaaggtctgacgctggcaagtatgttgaacgatgtgccaatttctcgctgggatgcaagtgccggttctgactggcagccgaagaactcaccaccgcagtatgctggtccaattcgcttacgtcaggggctgggtcagtcgaaaaacgtggtgatggtacgcgcaatgcgggcgatgggcgtcgactacgctgcagaatatctgcaacgcttcggcttcccggcacaaaacattgtccacaccgaatcgctggcgctgggttcagcgtccttcaccccaatgcaggtggcgcgcggctacgcggtcatggcgaacggcggcttcctggtggacccgtggtttatcagcaaaattgaaaacgatcagggcggcgtgattttcgaagcgaaaccgaaagtagcctgcccggaatgcgatattccggtgatttacggtgatacgcagaaatcgaacgtgctggaaaataacgatgttgaagatgtcgctatctcccgcgagcagcagaatgtttctgtaccaatgccgcagctggagcaggcaaatcaggcgttagtggcgaagactggcgcgcaggagtacgcaccgcacgtcatcaacactccgctggcattcctgattaagagtgctttgaacaccaatatctttggtgagccaggctggcagggtactggctggcgtgcaggtcgtgatttgcagcgtcgcgatatcggcgggaaaaccgggaccactaacagttcgaaagatgcgtggttctcgggttacggtccgggcgttgtgacctcggtctggattggctttgatgatcaccgtcgtaatctcggtcatacaacggcttccggagcgattaaagatcagatctcaggttacgaaggcggtgccaagagtgcccagcctgcatgggacgcttatatgaaagccgttcttgaaggtgtgccggagcagccgctgacgccgccaccgggtattgtgacggtgaatatcgatcgcagcaccgggcagttagctaatggtggcaacagccgcgaagagtatttcatcgaaggtacgcagccgacacaacaggcagtgcacgaggtgggaacgaccattatcgataatggcgaggcacaggaattgttctgattaaaaaggcgcttcggcgccttttcagtttgctgacaaagtgcacttgtttatgccggatacggcgtgaacgcgttatccggctaacaaaatcgtgaaaactcaataaattgcagaaaccccataagcctgataaacattgtgcatcaggcaaacttcacgcatttacactcgcccctgccctttcaaccattcgcgcacgaggaacagcgcactgacattgcgcgcttcattgaagtcagggtcttccagcaaatccatcatatgcgccagcggccagcgcacctgtggtagcggctctggctcatcgccttccagtgattccgggtagagatcttgcgctaccacgatattcattttgctggaaaagtaagacggtgccatgctgagcttcttcaaaaaagtcagatcgttcgctccaaatccaacctcttcttttagctcgcggttagcggcttcgtagacgctttcacccggatcaattaatcctttcgaaaaacctaattcgtaggattcagttcccactgcgtattcgcggatcaggatcaggtgatcgtccacaatcggcacaatcatcactgcttcccggttggttggacgcattcgttcataaacacgccgcacgccattgctgaactccagatccacgctctcgacggtaaacagtcgggaacgggctacagtttcaacattcagaatggtgggtttttgtaatgatttgctcatcgtgggatctatgctgtgaaatcagcggttattgtgcgatatcggacacgctttcggcaatgtgaattgcatgttatttacatttatgtaacttaataaataatcgtcctcaaatcaaattaaaagtcaataggttgaaataactccaggaatttgctgatattccgccttcagagggtttgctatgatcagcggttactgtgatgtgcttaatgatgctcaagttaaactccacgcttgccgatagccaaccgcagaatcatgtattgtgtccggtgcgactgaccacgcctgacagactaagtaagatggggaaagcatgagcaccattgtgatttttttagctgctttgctggcctgctcactacttgcgggatggctgataaaagtgcgatccagacggcgtcagctgccctggaccaacgccttcgcggatgcgcaaacgcgtaaactcacacctgaagaacgtagcgccgttgaaaattatcttgagagcctgacgcaggtattacaggtgcctggcccaacgggagccagcgcggcaccgatctctctggcgctgaatgccgaaagcaacaacgtcatgatgctgacacacgctatcacgcgttacggcatctctaccgacgatccgaataaatggcgttactacctcgattcggtagaagtccacctgccccctttctgggaacagtacatcaacgatgagaataccgttgaactgattcataccgattcgctgccgctggttatttcactcaacggtcatacgctgcaggagtacatgcaggaaactcgcagctatgccttgcaacctgttccgtcaacgcaggcgtcgattcgcggggaagagagtgagcaaatcgagctactcaatattcgcaaagaaacgcatgaagaatatgcgctgagtcgtccgcgcgggctgcgtgaagcgttgctgatcgtcgcctccttcctgatgttctttttctgcctgattaccccggatgtatttgttccgtggctggcaggcggcgcgttactgctgctgggcgcaggtctgtgggggctattcgcgcccccggcaaaatcctccctgcgggaaattcattgtctgcgcggtacaccccgtcgttggggattgtttggcgaaaacgatcaggaacagatcaacaatatttcactcggtattatcgacctggtctatcccgcacactggcagccatacattgctcaggatctcggtcaacaaaccgatatcgatatctatctcgaccgccatgtagtgcgtcagggacgatatctttcgctgcatgatgaagtaaaaaactttccgttacagcactggctgcgcagtacgattatcgctgcgggctcgctgctggtgctgtttatgctgttattctggatcccgctggatatgccgctgaaattcactctctcatggatgaaaggcgcgcagaccattgaagccaccagcgtaaaacaactggctgacgctggcgtgcgggtaggcgatacattgcgtattagcggtacgggaatgtgtaatattcgaacttccggaacctggagcgcgaaaaccaattcaccttttttaccgtttgactgctcgcagatcatctggaacgacgcccgctcattgccattaccagaatctgaactggtcaacaaagcgacggcattgactgaagcagttaatcgccagctgcaccctaaaccggaagatgaatctcgcgtcagtgcctcattacgttcagcaattcaaaaatccggcatggtattgcttgatgattttggcgacattgtactgaagacagcggatttatgttctgccaaagatgactgtgtgcgactgaaaaatgcgctggtcaatctcggcaacagtaaagactgggacgcgctggtaaaacgcgccaacgccgggaagctcgatggcgtgaatgtgttattacgcccggtgagtgcggaatcgctggataacctggtggcaacctccaccgcgccgtttatcacgcatgaaacggcgcgagcggcacaatcactaaacagtccggcccccggcggattcctgattgtcagcgacgaaggcagcgattttgttgatcagccctggccttcggcatcactttacgactacccgccgcaagaacagtggaacgctttccagaaactggcacaaatgctgatgcatacgccgtttaacgccgagggtatcgtcacaaaaatcttcactgacgccaatggtacgcagcatattggccttcatccgatcccggatcgttccggcctgtggcgctatctcagcaccacattgctgctactgacgatgctgggtagcgccatttacaatggcgtacaggcctggcgtcgttaccagcgtcatcgcactcgcatgatggagattcaggcctattatgaaagctgcctgaacccgcaactgatcaccccttcagaaagccttatcgaataacacgtttgcgcggcaggttatgctaccctgtcgcgcaaattgcttcactctggagatttccctcatgcatatcaacattgcctggcaggacgtagataccgttctgctggatatggacggcacgttgctcgacctcgccttcgataactatttctggcaaaagctggtgcctgaaacatggggcgcgaaaaacggggttacgccacaggaagcgatggaatatatgcgccagcaatatcacgacgtacagcatacgctaaactggtactgtcttgattactggagtgagcaactgggtctggatatctgtgcgatgaccaccgagatgggaccgcgtgccgtactgcgtgaagataccattccgtttcttgaggcactgaaagccagcggtaagcagcgaattttgctcaccaatgcgcatccgcacaacctggcggtaaaacttgagcataccggtctggacgcacaccttgatttattactttccacccacacatttggttatccgaaagaggatcagcggttatggcatgcggtggccgaagctacgggtctgaaagctgaaagaacgctgtttattgatgacagcgaagcgattctcgatgctgccgcgcaatttggtattcgttactgcctcggcgtgactaatcctgattccgggattgccgagaaacagtatcaacgccatccgtcactgaatgactaccgccgcctgatcccctcgctaatgtgaaggagacgccatgaaagagaaacctgctgttgaggttcgactggataaatggctatgggctgcccgtttttataaaacccgcgcgctggcccgtgaaatgattgaaggcggtaaggtgcattacaacgggcagcgcagcaagccgagcaaaatcgtcgagctgaatgccacgctcactctgcgccagggaaatgacgaacgcacggtgattgtaaaggcgattactgaacagcgtcgccccgccagcgaggcagccttgctgtatgaagagactgcggaaagtgtagagaaacgcgaaaaaatggcgctggcacgtaaacttaatgccttaaccatgccgcacccggaccgacgcccggacaaaaaagagcgccgcgacctgttacgatttaaacacggcgacagtgaataactgtcacctgcaagagagatgattatgccgcaacatgaccaattacatcgctatctgtttgaaaactttgccgtgcgcggcgaactggtaaccgtttcggaaaccctgcaacagatccttgagaaccacgattatccgcagcccgttaaaaacgtgctggcagaactgctggttgcgaccagcctgttaaccgctacgctgaagtttgatggtgatatcaccgtacagctgcagggcgacggtccgatgaatctggcggttattaacggtaacaataaccagcagatgcgcggtgtggcgcgcgtgcagggcgaaattccagaaaatgccgacctgaaaacgctggtcggcaatggttacgtggtgatcaccattaccccgagcgaaggcgaacgctatcagggcgtagttggtctggaaggtgataccctggcggcctgcctggaagattactttatgcgttctgaacagctgccgacgcgcctgtttattcgcaccggcgacgtagacggcaaaccggctgcaggcggtatgttgttgcaggtaatgcctgcgcaaaatgcccagcaggacgactttgaccacctggcgacgctaaccgaaaccatcaaaaccgaagaactgctgaccttaccggcaaacgaagtgttgtggcgtttgtatcacgaagaagaggtgacggtttacgatccgcaggatgtggagttcaaatgcacctgctcgcgtgaacgttgcgccgatgcgctgaaaacgctgcctgatgaagaagttgatagcatcctggcggaagatggcgaaattgacatgcattgtgattactgcggtaaccactatctgttcaatgcgatggatattgctgaaatccgcaacaacgcgtctccggcagatccgcaagttcattaatgagtatgtccggcagagagggctctgccggattttacgactaatacacctgatgcgctttgtcactcattcagattcacattcagcctttcaccatccactacaagatcgcgccacgctttaggcttcgtccccagttttccatccttcgcagctgtgagtaatttttctttcgttatttcgttcggaagtaaactcatatcaagcgcgtcccattcttttctgtctgagtcaaagccatagacaatgactctgtcatcattaaaagcaaacaggatccgctccgcctgaccatcactattcagatcttgctcgaccaggacgcaggcgtctttttcaatacaggtcatcacgttatagcgatcctggattaaggccgaccagaatgtcgcatcaggtttaacagaaccaggggcaattaacacattatcggctaatactttttccgatacctgttgctgaagatgttgctctccatctaacgccatcagcagatcccgcgcgcgtttcgggtctttcataaacccggcatcgcttttcagcgactcaagcgcagcacgtccatagcgaccgctctgctcgagcatgtagatagttacctggtctgacgtgtttttgccgctctgataacgcgccatatggctgttcacgctaatgcgcatactgtccagcaccggcgaattaagaagcaccagtatcaccaacaccaataacgaaaccgcaaggttcactttgccctgaagaacaacgggattttgccctttacgccagacgatgctgacaaaataccccagcgaccacaccagtaacaccagcaccgccagcacgccctgcaagcggtcgacagtccagccgtactgagcgacccgcagccataacgcccaggcggcgacgaacacatacagcggagcaaccagcaaagcggttttaatcaggcaacgcaacggccctgtccagggaagtgacgctttttgcggatcgcggacaatagccattaagatcaattgcaaaaaggccagcgtcaacagcaacccggcggcggagatgtggcgagaaatcgcgctcaggcccgtaaacggcagggtgatgataaacatcagggttagcaatgatactaacggcagcaaccccgtggcgattaacgtgaacaacttttgaatagagtcgattaaacgtgactgtgttcgcgcgaggatcaccgccagcgcggtaaccagacctaacgtgagataaataaaccagtcggttgcaaaaaagagcgtattgaaaaacgtgatgccaacaagtttaaacaactcactccacagtaaaagcaccagccacgtcaagccattggcgagaaaaatcaccagtaatataagtacgttatgccatactgactggtaaaaatagcgatagcggctactgtcattgcggatgcgaaggctttgttgtatccacggtagcaacaacattgccatcaacagcagatagcaaccaaaatcccaaagcgccttttcagctctccaggggttcatgccatcagtttgccacttcagccagccgctcatccccagcgtggcaataaacactagcgccagccatccccaaaggcgcttctgtttaaaagagatcacggagaagagtaaaacggatgaaaacgcgacggtcgcaggcacgccataaacaatccaactgtgattttttccggaaagccaggcgatcagcaggtagcaaaccagaccctgaagtaatccggtagcaatcatcccccagcgtgttgcgggtgaaagttcaacgttatccatgttggttatccagaatcaaaaggtgggttaattatcgcatccgggcagtagtattttgcttttttcagaaaataatcaaaaaaagttagcgtggtgaatcgatactttaccggttgaatttgcatcaatttcattcaggaatgcgattccactcacaatattcccgccatataaaccaagatttaaccttttgagaacattttccacacctaaaatgctatttctgcgataatagcaaccgtttcgtgacaggaatcacggagttttttgtcaaatatgaatttctccagatacgtaaatctatgagccttgtcgcggttaacacccccaaaaagactttactattcaggcaatacatattggctaaggagcagtgaaatgcgcgttaacaatggtttgaccccgcaagaactcgaggcttatggtatcagtgacgtacatgatatcgtttacaacccaagctacgacctgctgtatcaggaagagctcgatccgagcctgacaggttatgagcgcggggtgttaactaatctgggtgccgttgccgtcgataccgggatcttcaccggtcgttcaccaaaagataagtatatcgtccgtgacgataccactcgcgatactttctggtgggcagacaaaggcaaaggtaagaacgacaacaaacctctctctccggaaacctggcagcatctgaaaggcctggtgaccaggcagctttccggcaaacgtctgttcgttgtcgacgctttctgtggtgcgaacccggatactcgtctttccgtccgtttcatcaccgaagtggcctggcaggcgcattttgtcaaaaacatgtttattcgcccgagcgatgaagaactggcaggtttcaaaccagactttatcgttatgaacggcgcgaagtgcactaacccgcagtggaaagaacagggtctcaactccgaaaacttcgtggcgtttaacctgaccgagcgcatgcagctgattggcggcacctggtacggcggcgaaatgaagaaagggatgttctcgatgatgaactacctgctgccgctgaaaggtatcgcttctatgcactgctccgccaacgttggtgagaaaggcgatgttgcggtgttcttcggcctttccggcaccggtaaaaccaccctttccaccgacccgaaacgtcgcctgattggcgatgacgaacacggctgggacgatgacggcgtgtttaacttcgaaggcggctgctacgcaaaaactatcaagctgtcgaaagaagcggaacctgaaatctacaacgctatccgtcgtgatgcgttgctggaaaacgtcaccgtgcgtgaagatggcactatcgactttgatgatggttcaaaaaccgagaacacccgcgtttcttatccgatctatcacatcgataacattgttaagccggtttccaaagcgggccacgcgactaaggttatcttcctgactgctgatgctttcggcgtgttgccgccggtttctcgcctgactgccgatcaaacccagtatcacttcctctctggcttcaccgccaaactggccggtactgagcgtggcatcaccgaaccgacgccaaccttctccgcttgcttcggcgcggcattcctgtcgctgcacccgactcagtacgcagaagtgctggtgaaacgtatgcaggcggcgggcgcgcaggcttatctggttaacactggctggaacggcactggcaaacgtatctcgattaaagatacccgcgccattatcgacgccatcctcaacggttcgctggataatgcagaaaccttcactctgccgatgtttaacctggcgatcccaaccgaactgccgggcgtagacacgaagattctcgatccgcgtaacacctacgcttctccggaacagtggcaggaaaaagccgaaaccctggcgaaactgtttatcgacaacttcgataaatacaccgacacccctgcgggtgccgcgctggtagcggctggtccgaaactgtaatgatttgaagctggagaatatctatccagtatcttatagaaagcaaaacgggaggcaccttcgcctcccgtttatttacccttcttttgtcgtgccctgcgcccgcgttaccggcactggcagccaggcgcgaatggaaagcccgccccgctcgctggtgccaagctccagcatcccgttatggttatccacgatacgctgcacaattgccagccctaatcccgtgccgctaatggtgcgcgcactgtcgccgcggacaaacggctggaacaggtgcttacgttgttccggcgcaattcccggaccgtcatcttccacctggaaccaggcgcgattcggctccgttccgctgctgactttgatccagccattgccataacgggcggcgttgaccaccatattcgccaccgcgcgtttgatcgacagcgggtgcattttcacttcaatgctgccggggtaaagcgcggtttcaatttcccgctcatagccactttcggcagcaatcacctcaccgagtactgcattaagatccgccatttccatcggcatctcctgcccggtgcgcaggtagtcgataaactgctcaatgatggcgttgcactcttcgatatctttattgatcgattctgccagatagccatcctgctcgctcatcatctcagtcgccaggcgaatacgcgtcagcggcgtgcgcaagtcgtgacttacccccgccatcagcagcgtgcggtcatccgccagttgcttaacaccagccgccatatggttaaaggcacgggtaacggaacgcacctccgaagcgccatactcacgcagcggcggcggaataatccctttaccaacctgcaaggctgcgtgttcgagatcgaccaacggtcggttctggatacgaataaacagccacgccccgcctatcgccaatagcataatcgccagcgtatagcggaacagcggagagaaatcgccctgatgaatttcggtcagcggcacgcgtacccagatattgggcgacagccaggttttcagccagacgacaggcgaacttttgttgacctcaacgcgcacttccgtcgggccgcccagttgctgcgccatctgatggcttaagaattcatagtgttgcgcccaacgcagacctgcctcttcggcagcctcgttggagtagagagagatccccagctcacggtagatctcccgacggaaagcgggaggcacaaccaactgcgtgccgtcctccagttgcagtttgtcggtcatcaacatacgcacttcgtacgcgaggactttattaaactgctggaggctcggcaaaatcgcgaagttcagcaccaccagataagtcgtcaccaggctggcgaacagcaaggtgacgatgagcaataacgtacgggcaaatgaacttcgtggcgagaagcgcaatcgcctcatgctttagagccgtccggtacaaagacgtagcccagaccccagacggtctgaatgtaacgcggatgcgctggatcttcttccaccatgcggcgcagacgcgaaatctgcacgtcgatggagcgttccattgcggaatattcacgaccacgggcaaggttcatcagcttatcgcgggagagcggctcacgcggatggctgaccagtgccttcagtaccgcaaactcaccgctggtgagcggcatcggctcgtcttcgcggaacatttcgcgcgtaccgaggttaagtttgaacttaccgaaagcaattaccgcctcttcctgtgacggtgcgcctggcagttcgttcgcctgacgacgcagcaccgcacggatacgggccagcagttcacgcgggttaaacggttttggaatgtagtcgtcagcgccaatctccaggcctacgatacggtccacttcttcccctttcgccgtcaccataatgatcggcatcgggttgctctgactacgaagacgtcggcaaatcgacaagccatcttcaccaggtaacattaaatccagtaccataagatggaaagattcacgagtcagcaggcgatccatctgttctgcattagcgacgcttcgaacctggaagccttgttcggtgagataacgttccagcagcgcacgcaggcgcatgtcgtcatcgaccaccagaatcttgtagttctcttgcattgtttgtactcccaaaggttcgcaacaatttgtaagcgtgtattcttaaaaaagctcacgttcgtcaccagctaaatctggtatgaatttcagcctaaattgttacaaagcatattaaacagcagcttaagtatacaatttattcggcgaaacattattgattctgttgatatgatcacgttatacccaatgtgcgcattatcaaacagacaaagggaatcaacgagatgaaaacgcccctggttacccgggaagggtatgaaaaactcaaacaagagcttaattatctctggcgtgaagaacgcccggaggtcacaaaaaaggtgacctgggccgcaagtctgggcgaccgcagcgaaaatgctgactatcagtataataaaaagcgtctgcgtgaaatcgaccgtcgcgtgcgctatctcactaaatgcctggaaaatctcaaaatcgtcgattactcccctcagcaggaaggcaaagtcttttttggcgcgtgggtggagattgaaaacgacgatggcgtgactcaccgtttccgtattgtcggctacgatgaaatttttggccgtaaagattacatctctatcgattccccgatggcccgcgcattgctgaaaaaagaagtcggcgatctggcggtggtgaatacccctgccggggaagcgagctggtatgttaatgctatcgagtacgtgaaaccgtaaggaagagtcttaacctcctgccgatggctggcatttttgccagccagtccgtataactatcccctgatttttgatccgaaaagatgaactcaaaccatgatgaatgattcgttctgccgcattattgcgggtgaaattcaggcgcgcccggaacaggttgacgctgccgttcgcctgcttgacgaagggaataccgtgccgtttatcgcacgttatcgtaaggaaatcaccggcggtctggatgacacgcagctgcgtaatctggaaacgcgtctgagctatctgcgcgagctggaagagagacgtcaggcgatcctcaagtccatttccgagcaaggcaaactcaccgatgatctggcgaaggccatcaacgccaccctaagcaaaaccgaactcgaagacctctacctgccctacaaacctaaacgccgcacccgcgggcaaatcgccattgaagcagggcttgagccgttggctgacctgctgtggagcgatccgtcacacacgccagaagtcgccgctgcacaatatgtttatgccgataaaggcgtggcagataccaaagccgcgctggatggcgcgcgctatatcctgatggaacggtttgccgaagatgccgcgctgctggcgaaagtgcgtgattatctgtggaagaacgcgcatttggtttctacggtggtgagcggtaaagaagaggaaggggcgaaattccgcgactatttcgatcatcacgaaccgttgtccacggtgccttctcaccgcgcgctggcgatgttccgtgggcgtaacgaaggcgtacttcagctttcgctgaatgccgatccacagttcgatgagccgcccaaagagagctattgcgagcaaatcatcatggatcaccttggcctgcgcctgaacaatgccccggcggatagctggcgcaaaggcgtggtgagctggacgtggcgcatcaaggtgctgatgcatctggaaaccgaactgatgggcaccgtgcgcgaacgtgcggaagatgaagcaatcaacgtctttgcccgtaacctgcacgatctgctgatggcggcccctgccggactgcgtgcaacgatgggcctcgatccgggtctgcgtactggggtaaaagtggcggtggtcgatgccactggcaaactggtggcgaccgacaccatttacccgcacaccggacaggccgcaaaagcagcgatgaccgttgctgcgctgtgtgaaaaacataacgttgaactggtagcgatcggtaacggtacagcttcccgcgaaactgagcgtttctatctcgatgtgcagaagcagttcccgaaagtgaccgcgcagaaagtaatcgtcagcgaagcaggcgcgtcggtttactcggcttccgagctggctgcacaggagttcccggatctcgacgtttcgctgcgtggcgcggtgtctatcgcccgccgtttgcaggatccgctggcggagctggtgaaaatcgatccgaaatctatcggcgtaggtcagtatcagcatgacgtcagccagacgcaactggcccgcaaactggacgcagtagtagaagactgcgtaaacgccgttggcgtcgatctcaacactgcttctgttccgctgttaacccgcgtggcgggcctgacgcgcatgatggcgcaaaacatcgttgcctggcgcgatgagaacggtcagttccagaaccgtcagcaactgttaaaagtgagccgtctggggccgaaagccttcgagcagtgcgcgggcttcttgcgcattaaccacggtgataacccgctggacgcgtctaccgttcacccggaagcctatccggtggtggaacgcattctggcagcaacacagcaggcactgaaagatctgatgggtaacagcagcgaactgcgtaacctgaaagcgtctgactttactgatgagaaattcggtgtgccgacggtaaccgacatcatcaaagagctggaaaaaccgggtcgcgatccgcgtccggaatttaaaaccgctcagtttgccgatggcgtcgagacaatgaacgacctgcaaccgggtatgatcctcgaaggcgcagtgaccaacgtcaccaactttggcgcgtttgtcgatattggcgtgcatcaggacggcctggttcacatctcttcattgtcgaacaagtttgtggaagatccgcataccgtggtgaaagcgggcgacattgtgaaggtgaaagtgctggaagtggatcttcagcgtaaacgtatcgccctgactatgcgcctggatgagcagcctggcgaaaccaacgctcgtcgcggcggcggtaatgaacgcccgcaaaacaaccgcccggcagccaaaccacgcggtcgtgaagcgcagcctgccggtaatagcgcgatgatggatgcgctggcggcggcaatgggcaaaaaacgttaaacgcccgtactggcctacggttcgaatttgcacgaaatcgtagggcagataaggcgttcacgccgcatctggcaacgaacgccttgcctgacataaaagtgccggagaatatctccggcatttttattccacagccaaactcataatatattccggcaatatttatcatttcattaacaactgaaaccttaattaaacattagccagtccgggtaattcactattcgaattatattttcgctgcgatataaccttgagccacatcaacattgagtcagattattattcaaaccaacattcgcacacattttaagtattgctgatagaaaccattctcattatcattgtgttgttgattatttaatctctcctttgttggcaaatcatctggtctcatgtcgctgtcaaacgccccatgaggtagttatccagttaatgagaaacaagtaggcacctatgcaatacactccagatactgcgtggaaaatcactggcttttcccgtgaaatcagcccggcatatcgccaaaaactgctttctcttggcatgttacctggctcctcttttaatgtggtgcgcgtcgctccactcggcgaccccattcatatcgaaacccgtcgtgtgagcctggtattacgcaaaaaagatctggccttattagaagtggaagcggtttcctgttaatacggtgataacaacaatgaaaaaattaaccattggcttaattggtaatccaaattctggcaagacaacgttatttaaccagctcactggctcacgtcagcgtgtaggtaactgggctggcgttaccgtcgaacgtaaagaagggcaattctccaccaccgatcatcaggtcacgctggtggacctgcccggcacctattctctgaccaccatctcatcgcagacctcgctcgatgagcaaatcgcctgtcactacattttgagtggcgacgccgacctgctgattaacgtggtggatgcgtctaaccttgagcgtaacctgtacctgacgctacaactgctggaactcggcattccctgcattgtggcactgaacatgctcgacattgccgagaagcaaaatattcgtattgaaattgatgctctgtcggcgcgtctgggctgtccggtgatcccgctggtttcaacccgtggtcgcggtattgaagcgctcaagctggcgattgatcgctataaagctaacgagaatgtggaactggtgcattacgcacagccgctgctcaacgaagcagattcactggcaaaagtgatgccttccgacatcccgctgaaacaacgtcgctggctgggcctgcaaatgctggaaggcgatatctacagccgcgcctacgccggtgaagcgtcgcagcatctggatgccgccctcgcccgtctgcgtaatgagatggacgatccggcgctgcacattgccgatgcgcgttaccagtgcattgctgccatctgtgatgtggtaagcaacaccctgacggcagaacccagccgtttcaccactgcggtagataaaatcgtgctcaaccgtttcctcggtctgccgattttcctctttgtgatgtacctgatgttcctgctggctatcaacatcggcggggcgttacagccgctgtttgacgtcggctccgtggcgctatttgtgcatggtattcaatggattggctacacgctccacttcccggactggctgactatcttcctcgcccagggcctgggtggcggcattaacaccgtgctgccactggtgccgcagattggcatgatgtacctgttcctctccttccttgaggactccgggtatatggcgcgtgcggcgtttgtgatggaccgtctgatgcaggcgctgggcttgccggggaaatcctttgtgccgctgatcgtcggtttcggttgtaacgtaccgtcggtaatgggtgcacgtacgcttgatgcaccgcgtgaacgtctgatgaccatcatgatggcaccgtttatgtcctgcggcgcgcgtctggctatcttcgcagtattcgcggctgccttcttcgggcagaacggtgcgctggcggtcttctcgctgtatatgctgggtattgtgatggcggtgctgactggcctgatgctcaagtacaccatcatgcgcggtgaagcgacgccgtttgtcatggagttgccggtctatcatgtaccacacgttaaaagcctgattatccagacctggcagcgtctgaaaggcttcgttctgcgtgctggtaaagtgatcatcatcgtcagcattttcctgagcgctttcaacagcttctcgctgagcgggaaaatcgtcgataacatcaacgactcggcgctggcgtccgtcagccgggtgatcaccccggtcttcaagccaattggcgtgcatgaagataactggcaggcaacggttggcctgtttacaggtgccatggcgaaagaagtggtagtgggtacgctcaacaccctctacaccgcagaaaatattcaggacgaagagttcaatccggcagaatttaacctcggtgaagagctgttcagtgcgatagatgaaacctggcagagcctgaaagacaccttcagccttagcgtactgatgaaccccattgaagccagcaaaggcgacggcgaaatgggtaccggggcgatgggcgtgatggatcagaaattcggtagcgcagcagcagcttacagctacctgattttcgtcctgctgtatgtaccatgtatctcggtgatgggggctatcgcccgtgaatcaagccgtggctggatgggcttctccatcctgtgggggctgaatatcgcttactcactggcaacattgttctatcaggtcgccagctacagtcagcatccaacttacagcctggtgtgcattctggcggttatcctgtttaacatcgtggttatcggtctgctgcgccgcgcgcgtagccgggtggatatcgaactgctggcaacccgcaagtcggtaagcagttgctgcgcagccagcaccaccggtgattgccattaatggcttcacttattcaggtgcgcgatttgctggcgttacggggccgtatggaagcggcccagataagccagacattgaacactccacagccaatgattaacgccatgctgcaacaactggaaagtatgggcaaagccgtgcggattcaggaagaacctgacggctgcctctctggcagttgtaaaagctgcccggaaggaaaagcctgtctgcgcgagtggtgggcgctgcgttaaccttactccatcgcctgttttggaaagcccggtatgcgtctgcatccgggcttttttgcgtgcggctttccataaaaatgcaactcttgcagcacggcgtaagttcctttgaaagcatctcgcagggatgaaaactcgctaatacacaggtgtggagtggcgcgtagagtcgcggcattcaaacaacaggtgaaggaacgccatgagcaaaaagcagagttccaccccacacgatgcgctgttcaaactctttttacgccaaccggacacggctcgtgattttcttgcgtttcatttaccggcacccattcacgcgctttgtgatatgaaaaccctcaagctggagtcgagcagctttattgatgacgatctgcgtgaaagctattccgatgtgctgtggtcggtgaaaacggaacaaggaccaggatacatctattgtctgattgaacatcaaagcacctcaaacaaactgatcgcatttcgcatgatgcgttacgctattgccgcaatgcaaaatcaccttgatgctggatacaaaacgttgccgatggtggtgccattgttgttttaccacggtattgaaagcccctatccctattcgctgtgttggctggattgtttcgccgatcccaaactggcaaggcagctttatgcctccgcatttccgctgattgatgtcaccgtcatgcctgatgatgaaatcatgcagcaccgacgtatggcgctgctggagttaattcaaaaacatattcgtcaacgcgacctgatggggctggtagagcaaatggcctgcttattaagtagtggatacgctaatgacagacaaatcaaagggctgtttaattacatactgcaaactggcgacgctgtacgttttaacgattttatcgacggcgttgccgaacgttcaccaaaacacaaggagagtttaatgactattgcggaaagattgcggcaggagggggaacaatccaaagccctgcatatagccaaaataatgcttgaatccggagttcctcttgcagacatcatgcgctttaccgggctgtcagaagaagagttggctgcggcgagtcagtaaagttctgtctcgccatttcaaaagccacctacaccctctgcttcaacgccaccagcaggtgacaaaactcggccggatgcgaaataaatggcgcatgggccgctttggcgaagatatatgattcgctgtgaggccaaagtttatccagcatcggcaccactttgcgcggcaccagaccgtcgagatagccatacaatcgcaaaaacggcatggacacgttttgcagcggctgacggagatcgaccgttttcaggatttccagcccgccattaagcacgtcaacctccggcatcggtaacgccagaacggttttcttcaacgcccgcgcatcctggcgcgccgtttcagtccccatggtttgtaacgccaggaaccgctccactgtacgctgaaaatcatcactgagttgctgctgaaatcccgccagcacgtccggttttatccccggccactcgtcacgagcactaaaacaaggtgacgacgccacggtgaccagcgcctgaacacgctcgggatgggttaacgcaatctggcttgccaccagcccgcccagactccagcctaaccaaatggctttatcaggtgcctgttgcagcacggcttcggccatatcagcaagtgacagcgcaccaaatccccggctacgcccgaagccgggcaggtcaacaaggtgcagcgtaaaatgcgagctaagttcctcgtcaatgcaacgccacacttcggcattcagtccccatccgtgcagcagcacaagatgaacattcccctgacctttggtctgccaccagatgttattcatccgctattgttctcttttgacttacaaggatgaacatatgctaacagtaccgggattatgctggctatgccgaatgccactggcgttaggtcattgggggatttgttcggtctgttcacgcgccacccgcacagataaaacgttatgcccacaatgtggattacccgccacacactcccatcttccctgcggtcgctgcctgcaaaaaccgccgccctggcaaagactggtcacggttgccgactatgcgccgccgttaagtccgcttatccaccagcttaaattttcccggcgcagtgaaatcgccagcgccctgtcacgtctgttactattggaagtcttacacgctcgtcgcaccaccgggttgcaattgccggatcgcatcgtcagcgttccgttatggcagcggcgtcactggcgtcggggatttaatcagagcgatttgctgtgtcagccgttatcacgctggttgcactgccaatgggatagcgaagccgtcacacgtacacgggccactgcgacccagcattttctcagtgcccggctgcgcaagcgcaacctgaaaaatgcctttcgtcttgaattgcccgtgcaaggtcgccatatggtgattgtggatgatgtcgttaccaccggaagtaccgtcgcagagattgcgcagttgcttttacgcaatggtgcggcggctgtccaggtctggtgcctttgtcgaaccttgtagagcctcgatgatgggcgtattataaccaactaaaatagtcaactattaggccattactatgatccgtatttccgatgctgcacaagcgcactttgccaaactgctggcaaatcaggaagaagggacacaaatccgcgtatttgtgattaaccctggcacgcctaacgctgaatgtggcgtttcttattgtccgccggacgctgtggaagccaccgacacagccctgaaatttgacctgctgaccgcgtatgttgatgagttaagcgcaccatacctggaagatgcagagatcgattttgttaccgaccagttgggttcccagttaacgctgaaagccccgaacgccaaaatgcgtaaagtggcagacgatgcaccgctgatggagcgcgtggagtatatgctgcagtcgcagatcaacccacagcttgctggtcacggtggtcgcgtttcgctgatggaaatcaccgaagacggttacgccattctgcaatttggcggcggctgtaacggttgttccatggtcgatgtgacgctgaaagaagggatcgagaagcagctgctgaacgaattcccggagctgaaaggtgtgcgcgatctcaccgaacaccagcgcggcgaacactcctactactaagttatcccctcttttgtagattgcccgatgcgacgctaaagcgtcatttcgggcctacgttgaacatgtgccagacgttggcgcagcattgctttgtcaaatcctcggttcgtttccccgcgataatatgaccaacctctcataatttaaatttaccccgctctggtgattctcaaacgccagatgttacccgtatcattcacatgggtaccaaacatactcctgacatctgactacaataattagttttagtgggtatcagtcgtggtgccgcaatatctctgttcccgattgggataattagagtttgtcgtcagaaaattgacgttacccataacaaatgaaaggccaggtaaatcatgccattagtcattgttgctatcggtgtaatcttgttgttgctcctgatgatccgcttcaaaatgaacggcttcatcgctctcgtcctcgtggcgcttgctgttggattaatgcaaggaatgccgctggataaagttattggctccatcaaagccggtgtcggcgggacgctcggtagccttgccctgatcatgggttttggcgcaatgctgggcaaaatgctggcagactgcggtggcgcacaacgtatcgccaccacgctgattgccaaatttggtaaaaaacacatccagtgggcggtggtactgaccggttttaccgttggttttgccctgttctatgaagtgggctttgtgctgatgctgccgctggtgtttaccatcgcggcttctgcgaatattccactgctgtatgttggtgtaccaatggcggctgcactgtctgtgacccacggcttcctgccaccgcatccgggtccgactgcgattgccaccattttcaatgccgatatgggtaaaaccctgctgtacggtactattctggcaatcccgaccgtgattctcgccggtccggtttacgctcgcgtgttgaaaggtatcgataagccaattccggaaggtctctacagcgcgaaaaccttcagcgaagaagagatgccgagctttggcgtcagcgtctggacctctctggtgccggtagtactgatggcgatgcgtgcgattgccgaaatgatcctgccgaaaggtcacgctttcctgccggtagcggagttcctcggtgacccggtaatggcaacgctgattgccgtgctgattgcgatgttcacctttggtctaaaccgtggtcgttcaatggatcagattaacgacacgctggtttcttccatcaaaatcattgcgatgatgctgttgatcatcggtggtggcggtgcgttcaagcaggtgctggtagacagcggcgtggacaaatacattgcttccatgatgcacgaaaccaacatttctccgctgctgatggcctggtcgattgctgccgtactgcgtatcgcgctgggttccgcaaccgttgcggcaatcactgcgggtggtatcgcggcaccgctgattgcaacgacgggtgttagcccggagctgatggttattgcggttggttccggtagtgtgattttctctcatgtgaacgatccgggcttctggctgttcaaagagtactttaacctgactatcggcgagaccatcaaatcctggtcgatgctggaaaccattatctcggtgtgcggtctggtaggctgtctgctgctgaatatggtgatttgataacactgactgccggatgcggcgtgaccgccttatccggcctacgattcgggatgaattagtaggccggataagacgcgtcaagcatcgcatccggcatcaaccgcactctacttcttcttcgctgcagctctgcgccgtctgtccaaatccttcagcaacttgttcacgccatcatcggcaaacatcgactcaagcgttgcggaaagcttgcgtcgccagtttttatactggtaactggtgccaggaatattcaccggttcggccatatccagccagtcttccggctgtagtcctaacagagcactgttactgtcggcaatgtagcgctgcaaaccacggttcagcgtcggcgtcatcgacatcaacgatgccttatgcccggcacgtttcggcagacaaccatatttatgcagtgcatccagcagcccttgcttcgccagttcgcgatcctgatacagaccgcgcagtaccacttcatccggatacagccccagggttttgcccagcgttagatccccgcactcccagtaaccgcgcagcgttggcaggtcatgtgtcgccgcaaccgccatcgactgctccggatacgctttcggtgcacggaacgtcttctcgtggtcgttttcgaaatagagcactttgtaagagtacacaccgctgctgcgcagcttaccgacaatctctaccggtacggtaccgagatcttcaccaatcaccatacagcgatgacgtttactttcgagtgccagaatcgagagcagatcatccaccggatagtgaacatacgcgccctgatctgccgtctcgccatacggtatccaccacaaacgcagcatcgacatcacatggtcaattcgtaatgcgccgcagttttgcatattggcacgcaacagctcgataaacggttcataggcacgcgcggtgatgatatgcgggtccattggcggtaatccccagttctgccccaacgggccgaggatatccggcggcgcgccaaccgatgctttcaggcaatatagttcacggtcacaccaggtttccgccccaccttccgctacgccaaccgccagatcacgatacaagccaatcggcatttcatagccctggcttatctcccagcaggcggcaaactggctgtaagccagccactgcaaccagagataaaaatcgacgtcatcacgatgttcttcgcagaactgacgcacttctggtgaatccacgttctgatacatctctggccatgcaggccagccccagcgcatttcgtcctctttcacttgctgggcatgtagcgcatcaaaggctgcctgccagaacaggctgtcgccctgctctgcaacaaactggcgaaacgcggccatctgctcatcatcacgttgcgcgaaacctttccacgccattcgtaatgctgtcatttttagggcggtaaccgtggagtaatcgacccagtcggcatcgcgcgcctgttgcagcgtctgttgcgtggtcggcaactgccaccaggcctgagcctcttcgctaagatggaaatcttcaacggcgttaacgtcgatataaatcacattcagccaacggcgagaagacgggctgtatgggctggcgctctccggatttgccggatagagcgcatgaatcgggttcaggccaatgaacgacccgccacgttttgccacatccaccagcatcgctttgagatcgccaaaatccccaataccccagtttttttccgatcgcagcgtataaagctgaacgcaggcaccccacagcttttgtttattcagcaacgcctgcggttcgtaacagcgtttcggggcgacaatcacccggcaatgcgcgcgctggtcgtcctgggtgagtgtcagcgtgtgataaccttccggcagcttcgtcggtagattgaacgctttgccccccgttacatggcctttgtactgcgttccttcttcggtggtcagcagccagctatattcgccgctgccctccaccaccatcggcatttttttgccgctggtataaaccatgacattcgggactggcgttaccgccactttcgtggcggtacgttgatgcatcgcgtcaagcaaacgccgtttggtttcggcgctaatcgactgcggtttaccgtgggcattgatgtaattggggctaatccccgccgccagcgcggcattatccagacgtttgctttccatcgagcttccttagcgttttgcctgccagatacgagcctgataatcgcgaatagagcgatccgagctaaacataccgcagcgggcggtattgaggatcgccgcgcgagtccaggcctcctggtcgcggtacagcacatccacctgcttttgtgcctctacataggctgcgaaatccgccatcaccagatacggatcgccgccctgtttgccgatactgtgcagcatctggtcgaaggcatgcttatcgccgtcgctgtatttaccgctttccagctctttcaatactgcgtccagcaccttatctttcttccgccatttcaccgggtcgtagcctttggccagaattgccttcacttgttccacggtatgaccaaaaataaagatattttcttcaccgactttctcggcgatttcaacgttcgccccatccagcgtaccgacagtaagcgcaccattgagcgccagtttcatattgccggtaccggaagcttctttacctgcagtcgaaatttgttcggagatatccgccgccgggatcagtttttccgccgccgaaacgcaataatccggcaggaacaccaccttcaacttatcgccaaccagcggatcgttgttgatcacgtcagccactttgttgatcgcaaagataatattcttcgccaggtagtagcccggtgccgctttcgcgccgaagaggaagacgcgcggtacgcgatcagcctgcgggttttcacgaatttctttgtacaacgccagaatatgcagcagattcaggtgctggcgtttgtactcatgcaaacgtttgatctgaatatcgaaaatcgcctgtggattgatctcaataccggtacgaactttcacaaactccgccagacggactttattcgcctgcttgatctcgcgatattgctgacggaatttcgcatcatcagcgaatttttccagattgatcagctgatcgagatcgttagcccactctttttgcagtgatttatccaacagagccgccagtgccgggttgcactgtttgatccagcgacgtggggtaataccgttggtgacgttatggaatttgttcggccatagctggtgatattccgggaacagatctttcaccaccagatccgagtgcagcgccgcaacaccgttcaccgcgaaaccgccaaccacacacaggttcgccatatgcacttgtttgtcgtgcaccaccgccagtttggcccacactttttcatcgcccggccaggttttctctaccagcgttttaaagcgagtattaatttcgttaataatctgcatgtggcgcggcagtaagcctttcaccagtttcacatcccagcgttccagcgcttctggcatcagggtatggttggtgtaagcgaaagttttgctggtaatggcccaggcgtcatcccagctcatctggtgctcatcgatcagcacgcgcagcagttctggaatcgcgatagttgggtgggtatcgttcagctgaataacttcgtaatccgccagttcgtgcagtttacgccccgccagatgatggcgacgcaaaatatccgctaccgaacaggcacactggaagtattgctgcatcaggcgcagctttttaccggcagtatggttgtcgtttggatagagaactttggtcagtttttccgcattgatgccctgctgttcggcacgcaagaaatcaccgtcgttaaatttagtcagatcaaacggatgcgcgtgcgtcgcctgccacagacgcagcggctgcgccacgccattacgatagccgacaacggggagatcccacgcttgaccggtaatggtaaactccggctcccagcgtccgtctttcgtcactttaccgccaatccctacctgcacatccagtgcttcgttgtggcggaaccacgggtagttactgcgatgccagtcatccggcgcttcaacctgtttgccatcgacaaaagactggcggaacaaaccatattgatagttcagaccgtaacccgtcgcagactgaccgacagttgccattgagtcgaggaagcacgccgccagacgtcccagaccaccgttacccagcgccgggtcgatctcttcttccagcaggtccgtcagattgatgtcataagccttcaacgaatcctgtacatcctgataccagccgagattcaacaggttgttgcccgtcaggcgaccaatcaaaaactccattgagatgtagttaacatgtcgctgattcgccaccggcttggcgaatggctgagcacgcagcatttcggccagtgcttcactcactgctagccaccactggcgaggagtcatttcagccgcagaatttaagccataacgctgccactgacgtgaaagcgcttcctgaaattgcttatcgttaaaaataggttgtgacataggagttccacttttcttagattttcaacacaacgttatcgctagtttgccaggctcgatgttgaccttcctcatcctgcgggggattaggcagggaggagttgcggggatgagcaaggaaatgtgatctcaaccacttaaagctagtgcaaaccacaggattagcatcaaatcaatgcaatacagcgcagaaaatctgtatctaagtgcaaaaaatggccgttgcgtattttcaaaaagcggaaggtaactctataaattaagtaaaggagtgaaacagtttcataagtaaaatatccagtgtgctccatctcattcttaatagatttattaagatcatctttttagatggcactttcatcaggaatgaagaagaaacccttgcttaaatgaatctgatgaacataagggaaaccagtattcacgctggatcagcgtcgttttaggtgagttgttaataaagatttggaattgtgacacagtgcaaattcagacacataaaaaaacgtcatcgcttgcattagaaaggtttctggccgaccttataaccattaattacgaagcgcaaaaaaaataatatttcctcattttccacagtgaagtgattaactatgctgattccgtcaaaactaagtcgtccggttcgactcgaccataccgtggttcgtgagcgcctgctggctaaactttccggcgcgaacaacttccggctggcgctgatcacgagtcctgcgggctacggaaagaccaccctcatttcccagtgggcggcaggcaaaaacgatatcggctggtactcgctggatgaaggtgataaccagcaagagcgtttcgccagctatctcattgccgccgtgcagcaggcaaccaacggtcactgtgcgatatgtgagacgatggcgcaaaaacggcaatatgccagcctgacgtcactcttcgcccagcttttcattgagctggcggaatggcatagcccactttatctggtcatcgatgactatcatctgatcactaatccagtgatccacgagtcaatgcgcttctttattcgccatcaaccagaaaatctcaccctggtggtgttgtcacgcaaccttccgcaactgggcattgccaatctgcgtgttcgtgatcaactgctggaaattggcagtcagcaactggcatttacccatcaggaagcgaagcagttttttgattgccgtctgtcatcgccgattgaagccgcagaaagcagtcggatttgcgatgacgtttccggttgggcgacggcactacagctaatcgccctctccgcccggcagaatacccactcagcccataagtcggcacgccgcctggcgggaatcaatgccagccatctttcggattatctggtcgatgaggttttggataacgtcgatctcgcaacgcgccattttctgttgaaaagcgccattttgcgctcaatgaacgatgccctcatcacccgtgtgaccggcgaagaaaacgggcaaatgcgcctcgaagagattgagcgtcaggggctgtttttacagcggatggatgataccggcgagtggttctgctatcacccgctgtttggtaacttcctgcgccagcgctgccagtgggaactggcggcggagctgccggaaatccaccgtgccgccgcagaaagctggatggcccagggatttcccagcgaagcaattcatcatgcgctggcggcaggcgatgcgctgatgctgcgcgatattctgcttaatcacgcctggagtctgttcaaccatagcgaactgtcgctgctggaagagtcgcttaaggccctgccgtgggacagcttgctggaaaatccgcagttggtgttattgcaggcgtggctgatgcaaagccaacatcgctacggcgaagttaacaccctgctagcccgtgctgaacatgaaatcaaggacatcagagaagacaccatgcacgcagaatttaacgctctgcgcgcccaggtggcgattaacgatggtaatccggatgaagcggaacggctggcaaaactggcactggaagagctgccgccgggctggttctatagccgcattgtggcaacctcggtgctgggtgaagtgctgcactgcaaaggcgaattgacccgctcactggcgctaatgcagcaaaccgaacagatggcacgccagcacgatgtctggcactacgctttgtggagtttaatccagcaaagtgaaattctgtttgcccaagggttcctgcaaaccgcgtgggaaacgcaggaaaaagcattccagctgatcaacgagcagcatctggaacagctgccaatgcatgagtttctggtgcgcattcgtgcgcagctgttatgggcctgggcgcggctggatgaagccgaagcgtcggcgcgtagcgggattgaagtcttgtcgtcttatcagccacagcaacagcttcagtgcctggcaatgttgattcaatgctcgctggcccgtggtgatttagataacgcccgtagccagctgaaccgtctggaaaacctgctggggaatggcaaatatcacagcgactggatctctaacgccaacaaagtccgggtgatttactggcaaatgaccggcgataaagccgccgctgccaactggttgcgtcatacggctaaaccagagtttgcgaacaaccacttcctgcaaggtcaatggcgcaacattgcccgtgcacaaatcttgctgggcgagtttgaaccggcagaaattgttctcgaagaactcaatgaaaatgcccggagtctgcggttgatgagcgatctcaaccgtaacctgttgctgcttaatcaactgtactggcaggccggacgtaaaagtgacgcccagcgcgtgttgctggacgcattaaaactggcgaatcgcaccggatttatcagccattttgtcatcgaaggcgaagcgatggcgcaacaactgcgtcagctgattcagcttaatacgctgccggaactggaacagcatcgcgcgcagcgtattctgcgagaaatcaatcaacatcatcggcataaattcgcccatttcgatgagaatttcgttgaacgtctgctaaatcatcctgaagtacctgaactgatccgcaccagcccgctgacgcaacgtgaatggcaggtactggggctgatctactctggttacagcaatgagcaaattgccggagaactggaagtcgcggcaaccaccatcaaaacgcatatccgcaatctgtatcagaaactcggcgtggcccatcgccaggatgcggtacaacacgcccagcaattgctgaagatgatggggtacggcgtgtaagtttagccggataacgcgccagatccggcttacatctctgcatcattcaatgctcacccgcgttacgccatctgtttctatcaaactaaaccgcaccggcaagaaacgctccaccaccgcgatattggtcagcagatggcatgagggatgggcgaccgtaaattcccccgcgcccgccagcgccatcggtagcaccagttggtcagcaagatattcccccaccgccgccgtgcttgccaggtagcgtttcacctctttcaccaactgtgccgcaaccacctcggcactgacgcgcttttcaccgacgacaaaaaagcgttcggtgatattttcactttcgacttcaagcgagacggtattacccggcccctggtcgcgcggcaggttatgaatattctgttcatgcagggaaaaactccccgccagtgtagcgatttcacgctcagcaacatggcgcggcacaccagctaatagaacttctccacgcatctgcacaatgttcccgcgctcgccaagttgcaaggtgttaaacgatgccacgggcgagacttccgttgccaccacaccgcctccggcagggtaaaaaccgtggcgtaacagcgtggtttgctgatgaattcctattttcgccagcagcggctccagcacccggcggataaaatccgcaggcggcgccgacgggttatcggtgccgccgctcacttcaacacgcgaaggtccatcggcaaaccacagcgcgggcagcaccgtttgcagcaccagcgtacaacttccggcgctaccgatagcaaagcggtaatcgccgccgcgcacggtgccgggccggaagagcagacgctgcgaccccagctccgcgccttccacggttgctccgcaaatttccgtcgccgcctttaccgcggtcagatgctggcgcaacagccccggtttcgcccgcccggcacgaatgctggtgatggtaaatggctggccggttatcatcgacaggctcagcgccgagcgcaggatctgcccgccaccttcgccctgtgcgccatccagcgcaatcatccttttcatcatttatccttttacgcacaccacctgacgcagggtatagataacttccaccagatcgctttgtgccgccatcaccgcatcaatatctttatacgccatcgggatttcgtcgatcacttcggcatctttacggcattccacatgcgcggtggcacgaatttgatcttccacgctgaacagttttttcgctttagttcggctcattacccgcccggcaccgtggctgcacgaacagaacgactcttcatttcccagcccacggacgataaagctttttgctcccatcgaaccgggaataattccatattgaccagcacgcgcagacaccgcgcctttacgcgtcacgtagatctcttcaccaaagtgctgttctttttgcacatagttgtggtgacagttgatctcttccatcgccagcgtttgtggctgtctgaccgttttctgcgtaatgctctgcaatgccgttaccacgttttccatcatcgcatcgcggttaaggctggcaaaaagctgcgcccaggccacggctttcaggtaatcatcaaagtattccgtaccttccataaagtacgccagatcacgcgacggcaacgtctcaagcgtttcctgcatctctttttgtgccagatcgataaagtaagtcccgatggcgttaccaattccgcgtgaaccggagtgcagcataatccacacctggtccgactcatcaaggcagatttcaataaagtggttaccggttcccagcgttcccaggtgtttatagttattggtattcaggaaacggggatatttttgcgttaaccactgataaccggcttcaagctcagcccatttagcatcgacgttaacaggtggattttcccaggcacctttatcacgtttacaacggccagtggtacgcccgtgcggcacggccgtttcaatcgcctgacgcagctctgccaggttttcaggcaggtcttccgccgttaacgcggtacgcagcgcgttcattccacagccaatatccacgcccaccgccgccggaataatcgcccctttggtcgggatcacgctaccaatggtggaacctttacccaggtgtacatcaggcattaccgcaatatgtttgaaaataaacggcatcttcgccgtattaataagttgctgacgcgcatcggcctctaccggcacgcctttggtccacatttttaccggggcattttcagtggtcagtaattcgtaattcattttgtttttctcttttcgttgtttgctgtcctgataattgcaaccgtcgtgccagaaaattaaataagcagcttaattttttaattcattgttttaaaaaagattatatctttacgtccgtaaccggagatttcccgcaaagccaatttaccgataatgaaatatcgtcttttataaggatatctaagatgcgtaaaacagtggcttttggctttgtcggtaccgtactggattatgccgggcgcggcagtcagcgctggtcaaaatggcgtccgacactctgtttatgccagcaagaatcgttggtcatcgatcgactggaattgttgcacgacgcccgctcgcgctcgctatttgaaacgcttaaacgcgatatcgccagcgtttcgccagaaacagaagtggtgagcgttgagattgaactgcataacccgtgggatttcgaagaggtctacgcctgcctgcatgatttcgcccgtggttacgagtttcagccagaaaaagaagactatttaattcacatcaccaccggtacccacgtcgcgcagatttgctggtttctgctggcagaagcgcgttacctgcccgcccggctgatacaatcttcacctccgcgcaaaaaagaacagccgcgcggcccaggtgaagtaacgattatcgatctcgatttaagccgttataacgccatcgccagccgctttgccgaggaacgccagcaaacgcttgattttcttaagtccggcattgccacgcgtaacccccacttcaaccgcatgattgagcagatcgaaaaagtggcgatcaaatcccgcgcgccgattctgcttaacggtccaaccggcgcgggcaagtcatttctggcgcgacgcatcttagagttaaaacaggcgcggcatcagtttagcggcgcgtttgtggaagtgaactgcgccaccctgcgcggcgataccgccatgtcgacgctgtttggtcatgtaaaaggcgcgtttaccggggcgcgggaatctcgtgaaggtttattacgcagcgccaacggcggaatgttgtttcttgatgagattggcgaactgggcgcagacgaacaggcaatgctgctgaaagccattgaagagaaaaccttttacccgtttggcagcgatcgccaggtgagcagtgattttcagcttatcgccggaacggtgcgcgatttgcgccagctggttgccgaaggcaaatttcgcgaagatctgtacgcgcggatcaatctctggaccttcaccctgccgggtctacgccagcgccaggaagatattgaaccgaacctggattatgaagtggagcgccacgcctcactcactggcgacagcgtgcgttttaacaccgaagcgcggcgcgcctggttggcttttgcgacctctccccaggcaacatggcgcggtaactttcgcgaactttctgccagcgtcacgcggatggccacctttgccactagcggacgcatcactctggacgtggttgaagatgagataaaccgtctgcgctataactggcaggagagccgcccctccgcgcttacggcgttgctgggcgcagaggcagaaaacatcgatctcttcgaccgtatgcaactggaacacgttatcgctatctgccgccaggcaaagtcgctttccgcagccggacgccagctttttgacgtttcgcgccagggcaaagccagcgtcaatgacgcggatcggctacgcaaatacctggcgcgttttggtctgacgtgggaagccgtgcaggatcagcacagctccagttgaatatggtggtccgtcagcacctgcatcacgcttactggcggcggggcgtcggtgtagacggcatctaccatgctgatgctgcccatattgaccatcgcgttacggccaaatttcgagtgatcgacaaccagcataacgtggcgcgagttctcaataatggcgcgtttggtgcgaacttcgtggtaatcgaactccagcagcgagccgtcgctatcgatgccgcttatccccagaatgccgaaatcaaggcggaactgggagataaaatcgagcgtcgcttcgccaatgatcccgccatcgcggctgcgtaattcgccaccggcgagaatgatgcgaaaatcttcttttaccatcaacgtgttagcaacgttgagattgttggtgacaatgcgcaaattgctgtgattgagcagtgcgtgcgctaccgcttccggcgtggtgccgatatcgataaacagcgtcgagccattggggatttgctccgccactttgcgggcgatgcgctctttttcttcggtctgggtggccttgcgatcgtgccacggcgtgttaaccgaactggaaggcagcgccgcaccgccatgatggcgcaggatcaggttttgctccgccagctcattgaggtcgcggcgaatagtctgcgggctgacggagaaatgctctaccagctcttcggtactgacataaccctgctgtttaaccagttcgataataccgttgtgacgttgtgtttgtttcatttataaatccctggaattattttcgttttcgcgcattgagcgaatcaacaaaagccatcgctaaacccacggctaacccggcgatgtgtgctccgttcgccatcgacatcccaaacaaatcaaaccatccggcgacaatccagatcagcgcaaagataattaacccacgttgcaggtaaatgccactttgcggatcgcgttcgccacgtagccagacgtagcccatcagcgcatacaccacgccagaaagcccgccaaaccacggcccgctgaatttttgctgcacatagccgcttaacagggcgctgataagcgtaatgacaattagcttaccgctaccgaggcgtttttccaccgcaccgccgagataccaccaccagagcaggttaaagaggatatgcatcagcgagaagtgcattaacgcgtgggtgaagtaacgccagaactcaaatttcagtgttggatcgaatggccaggccagccataacatcacttcctgatcgccgagaatttgcatggcaataaacaccaccacgcaggcgatcatcatcacccaggttaccggacctgcgcgttcacgcaaggcggcaaagaaaggataacggcgataatgcaggccactgccggtatggcctgcctgccagctcgccgccagataacgcggatctgccgggttttcgagaaaacgcgccagctccgcccgtacgcgctcggcctgggactcatccgccagccagacatcgctttggttatgttgttgaatcgtgaggataacaccctgcgtcgccatgtaatcaacaaacgcctgcgccacgcgggggttagcaaaagaggtaatcatcaacatcgttgctgtcgcttattccacacaaaaggggacagtataaagcgttacgcgccgtacgccacctctgcgggaaactgacgttgccaggcttcaaagccgccgtcaatgctatagaccacatcgtagccctgttgcagcagatactgcgccgcgcctttgctgctattgccgtgataacacatcaccatcaccggagtgtcaaagtcgttatcacgcataaaagcgcccagcgtgtcgttggttaaatggaaagcctgcaccgcatgtcccattgcgaaactctgtggatcgcgaatatcgaccagcaccgcctctttttcctgcaacttctggtgcgcgtcggcaacgttaatacattcgaactgatccatgcgtctctctttctttacaaacaagtgggcaaatttaccgcacagtttacgtcgaagcggcagataaacgccataatgttatacatatcactctaaaatgttttttcaatgttacctaaagcgcgattctttgctaatatgttcgataacgaacatttatgagctttaacgaaagtgaatgagggcagcatggaaaccaaagatctgattgtgatagggggcggcatcaatggtgctggtatcgcggcagacgccgctggacgcggtttatccgtgctgatgctggaggcgcaggatctcgcttgcgcgacctcttccgccagttcaaaactcattcacggtggcctgcgctaccttgagcactatgaattccgcctggtcagcgaggcgctggctgaacgtgaagtgctgctgaaaatggccccgcatatcgccttcccgatgcgttttcgcctgccacatcgtccgcatctgcgcccggcgtggatgattcgcattggtctgtttatgtacgatcatctgggtaaacgcaccagcttgccgggatcaactggtttgcgttttggcgcaaattcagtgttaaaaccggaaattaagcgcggattcgaatattctgactgttgggtagacgacgcccgtctggtactcgccaacgcccagatggtggtgcgtaaaggcggcgaagtgcttactcggactcgcgccacctctgctcgccgcgaaaacggcctgtggattgtggaagcggaagatatcgataccggcaaaaaatatagctggcaagcgcgcggcttggttaacgccaccggcccgtgggtgaaacagttcttcgacgacgggatgcatctgccttcgccttatggcattcgcctgatcaaaggcagccatattgtggtgccgcgcgtgcatacccagaagcaagcctacattctgcaaaacgaagataaacgtattgtgttcgtgatcccgtggatggacgagttttccatcatcggcactaccgatgtcgagtacaaaggcgatccgaaagcggtgaagattgaagagagtgaaatcaattacctgctgaatgtgtataacacgcactttaaaaagcagttaagccgtgacgatatcgtctggacctactccggtgtgcgtccgctgtgtgatgatgagtccgactcgccgcaggctattacccgtgattacacccttgatattcatgatgaaaatggcaaagcaccgctgctgtcggtattcggcggtaagctgaccacctaccgaaaactggcggaacatgcgctggaaaaactaacgccgtattatcagggtattggcccggcatggacgaaagagagtgtgctaccgggtggcgccattgaaggcgaccgcgacgattatgccgctcgcctgcgccgccgctatccgttcctgactgaatcgctggcgcgtcattacgctcgcacttacggcagcaacagcgagctgctgctcggcaatgcgggaacggtaagcgatctcggggaagatttcggtcatgagttctacgaagcggagctgaaatacctggtggatcacgaatgggtccgccgcgccgacgacgccctgtggcgtcgcacaaaacaaggcatgtggctaaatgcggatcaacaatctcgtgtgagtcagtggctggtggagtatacgcagcagaggttatcgctggcgtcgtaaattaacgtaaggtgatcaggtcagatttcaatctggcctgagactgatgacaaacacaaaactgcctgatgcgctacgcttatcaggcctacgtggtttatgcaatatattgaatttgcatggtcttgtaggccagataagacgttcacgtcgcatccggcatgaacaaagcgcactttgtcaaaaatctaacctactttttaattcagggaattaccgcaaagcccacgccatcatacccaacgtaacaaaactcaggcacgttccccactcgccccgagaaaaatagcattaatgcgcccagcgccagcataaaaattttgagcagaaggtaaattgttggcgtgataaggatattacaaacttcaataataccggcaagtccgacacccagcatggcaataaccaccgccaaaaattgcgccagtatggggatgccgaaaaaagtcattaccagcgaggtcaaaatccattttctgttttgcattattctttccattctttttgaatggtgaaattatactccccgagtccccttgccccttctggacacttttccgaaatgatggcggaaaaaaacgggaccctttggccccgttctatttattggtgaacttacaatctcaccggatcgatatgccagatatgatcggcgtactctttgatagtacggtcagaagagaagtagcccatattggcaatgttcagcatcgcttttgcggtccactcttcctgaagctcgtagagttcatcgactttatcctgacaatcgacatagctgcgataatccgccagtacctggtagtgatcgccgaagttgatcagcgaatcaaccagatcgcgatagcgacccggatcttccggactgaatacaccgctgccgatttgcgtcagcacctgatgcagctcctcatctttctcgtagtattcacgcggtttgtagccctgacgacgcagttcttccacttcttccgctgtgttaccaaaaataaagatattgtcagcaccgacatgatccagcatctcgacattcgcaccgtccaacgtaccgatagtcagcgcaccgttaagcgcaaacttcatgttactggtgccggaagcttccgtccctgccagcgaaatctgttcagacagatctgccgccggaatgatcaactgcgccaggctaacgctgtagttcgggatgaacacgactttcagcttatcgccaatctgcggatcgttgttgatcactttcgctacgtcattgatcaaatgaataatgtgcttcgccatgtaataggccgaagccgccttaccgccaaaaatattcacgcgcggtacccacttcgcatccgggtcggccttgatgcggttatagcgggtaatcacatgcaacacattcatcaattgacgtttgtattcgtgaatacgtttgatttgtacatcgaacaacgcctttggattcaccaccacattcagctgctgggcgatatactctgccagacgctttttgttctccagcttcgcctgatgcacagcgtgattaaccattgggaaatcacagtgttgttgcagctcattaagcaggctaaggtcggtgcgccagttacggcccaggtgttcgtccagcacggctgaaagcgatgggttcgctaccgccagccagcgacgcggcgtcacaccgttggtgacgttggtgaaacgacccgggaagattttcgcaaagtcggcaaacaacgattgcaccatcagattagagtgcagttccgatacaccgttaactttgtggctcacaacaaccgccagccaggccatacgcacacgacgaccgttggattcatcaatgatcgacgcccgtcccagcagatcggtatcgttcggatactgttcctgcaaggttttcaggaaatagtcgttgatttcaaagatgatctgcaggtgacgcggcagaattttacccagcatatcaaccggccaggtttccagcgcctcgctcatcagcgtgtggttagtgtaggagaagacctgacaacacacctcaaacgcgtcgtcccagctaaattggtgctcatcgatcagcagacgcatcatctcaggaatcgacagtaccggatgggtatcattgagatgaatcgcgattttatccgccaggttatcgtaggttttatgcaactgataatggcggcttaaaatgtcctgaatggtcgaggaaaccaggaagtattcctgacgcaggcgcagctcacgcccggagtaggtggagtcatccggatacagtacgcgagatacgttctcggagtggtttttatcttccactgccgcgaagtagtcaccctggttgaatttaccgaggttaatttcgctactggcttgcgcactccacaaacgcagcgtgttggtcgcgtcggtgtcgtaaccagggattatctgatcgtaagcgactcccagaatctcttcggtttcaatccagcgcgtttttttaccttcctgctgaatgcgaccgccaaaacggactttatagcgcgtgttgtggcgtttgaattcccacgggttaccgtattccagccagtagtctggcgactctttctggctaccgttaacgatgttctgcttgaacataccgtagtcatagcggatgccgtaaccgcgccccggcaaccctaacgtcgccagagaatcaaggaagcaagccgccagacgtcccaggccaccgttaccgaggcctgggtcattttcttcatcaatcagctcttcgagatttaaccccatcgcttccagtgcgccctgtacatcttcgtaaattcctagcgacaacatggcgttggagagcgtacggccaatcaaaaactccatcgacaggtagtaaacctgacgagtttcttgcgacaactgggcacggtttgaacgtaaccagcgctccacgagacgatcgcgcacagcaaataacgttgcgttcagccattcatgtttattggcgacgaccgggtcctttccaatcgtaaacatcagcttgtaagcgatagagtgcttaagagcttctacgctaagcgtgggcgatgaatatgtaaacggagcattcatataggcgtttcctgaaaactatttcaagcgatagtaaagctcacggtacgacttcgccgcgacctgccagctaaaatccattgccatagcctgacgttgcacaaaccgccacagtgaaggacgggaccacagtacaaaagcacgtcgaatagcccgtaacagcgaccaggcattactatcttcaaagacaaacccactggcgacgccatctgcaaggttctcaagagaacagtcagaaaccgtatcagcaagcccaccggtgcgccgcactaacggcagcgtaccgtacttcaatccataaagttgcgttaagccgcacggttcaaaacggctgggcaccagaatgacgtccgcgccgcccataatgcgatgcgaaaatgcttcgtgatagccaatctgaacgcccacctgaccggggtattccgctgccgccgcaaggaaaccttcctgcagcaccggatcgcccgcgccgagtagcgccagctgcccgccctgctccagaagacccggtaaggcttccagcaccaggtcgagacctttctggctggtcagacggctcaccactgcaaaaagcggcactttatcgtcaaccttaagccccattgcgatttgtaactggcgcttattttccgctttatcttccaacgtatcgcgggtgtaacgcgaggccaacagtaagtccgtctctggactccagattttctcgtccacgccgttcagtacgccggaaagacgcccttcacggtgacgctgttgcaacagaccttccataccgtaggcaaactgcggttcggtgatctcgcgagcgtaggttggactgaccgccgtaatgtgatcggcatagtacagaccggccttcaggaaagagatttgtccgttgaattccagcccatgaatattaaagaatgaccatggcaattggatgtcattcatgtgatgtgcataaaacatgccttgataggccaggttgtgcacagtaaacaccgacttcgccggacgcccgcgcgccgccagatacgcaggcgcaaggcctgcatgccagtcgtgcgcatgcaccacatcaggacgccagaatgggtcaagcccgctggccatttctgccccaacccaccccagcagcgcaaaacgcaatacgttgtcggtataggcaaataagttggtatcgtgatacgggcttcccggacgatcatagagatgcggcgcgtcaatcaggtaaatgccaaccccgttgtaatgaccgaacaacagcgtgatatgtccggcgaaggtatcacgacgggatactacctgcgcatcggtcacgccacggcgaatatcgggaaatgcaggcaacagtacgcgagcgtcaacgccgtctgcgatttgtgctgcgggtaatgccccaataacatcagccagaccgccggttttaagcagcgggaacatctctgaacatacatgtaaaacctgcattatcgctcctgtttatgccctaacttccgtagcatttcgcgcgttaccagcacgatgccttcttctgaacgatagaaacgacgtgcatcttcctctgcgttttcaccaatcaccatgccttccggaataacacaagcacgatcgatgacgcagcggcgcagacggcacgagcgacctacccatacttccggtaacaatacggcggaatcaatgttgcagaatgaattcacgcgaacgcgcgagaacagaacggactgcaccaccaccgaaccggagatcacacaaccgccggaaaccagtgagttaagggtcatcccgtggctaccggagcgatcctgcacgaatttcgctggcggtaatgattcattgtaggtgcgaattggccaattgcgatcgtacatatccagttccggcaccacagaggccagatcgaggttcgctttccagtaagcttccagcgtacccacatcgcgccagtacggctcggcatccgggtcggattgtacgcaagagagcgggaacgggtgcgcataggccagaccggcttcggtgatcttgggaatcaaatctttgccaaagtcgtggctggagttctcatcgcgatcgtcttcttccagcagttcatacagatagtcggcgtcaaagacgtagatacccatactcgccagagatttgctcggatcgttcggcattgacggcgggttagcaggtttttcaacgaattcgataattttatcgttctcatcaaccgccataacgccaaatgcggaggcttcttcaatcggtactggcatacaagcaacggtgcaacgtgcgcctttttcgacgtgatcgataagcatacgcgagtagtcttgcttgtagatatggtcgcccgccaggatcaccacgtattccgctttataacggcggataatgtcgaggttttgggtgaccgcatctgcggtgccgcgataccagttttcccctttcattctctgctgtgctggcagcagatcgacaaactcgttcatttcttcattgaagaatgaccagccgcgctgaatgtgctgcaccagagtgtgggactggtactgggtgatcacgcccatacgacggatcccggagttgatgcagttagacagcgcaaagtcgataatgcggaacttaccgccgaagtgtacggccggttttgctcgcttattggttaaatccttcaggcgggtaccacgtcctcccgccagtatcagggcaacagatttcaatggcagctggcgcgccaacattaagtgatcgttcttctctaaactaaccatgactaactccttttttatcatctctggaacacacacaatccgtgtgcaggtccctgccagacagccgtaatcactgggttatcctctccagcgaatgggggaatggcgtgccactccccagcaggtaaaacaatctctgttacctcaagcgtggcgttaattgcgatcaaaaagcgatccgagagcagaatttgcagctgtttcggcccgttttgccactcatccgtgcttaaaggttgagcatatcgatttagccaacggacattgccgtcgccttcttcccaccagcgattctccaccaaagcgggaatgcgcttgcgcagatggattaacgcggcggtaaatgcggttaaaccactgcttgcctgcgaccagtccaaccaggttaattggttatcctgacagtaggcattgttattgccatgctggctgtgaccatgttcgtcaccggccagtaacatcggcgtaccctgggagagcaacaacgttgttaacagggcgtgaatgctgtcgcgccgccgttcaaccaggtcaagagaaccgcctaacccttctttaccatgattgttactgtaattgttgttggtcccgtcgcgattttcttctccgtttgcttcattgtgtttatggttgaagcaaacgcagtcgcgaagcgtaaaaccgtcatgcgcggtgacgagattaatcgcggcactcggcagacgaccattacgtttaaaaacatcgctggaggcagcaaaacgcccggcaaacgcccccagaggcaaatcataatgtagccagaaacgacgggcagcatcgcggaaatgatcgttccactcggcaaacagcggcgggaaatttcccacctgataaccaccaggagcgatatcccacggttcagcaattaacttcacctgcgagagcaccgggcagttctggatagcggtaaacaacggcgcatcctgacggaactctggcgtacggcccatgactgccgccagatcaaagcggaaaccatcgacgtggcaggtttctacccaataacgcaggcaggcgctggcataatccaccaccgccggatgactcaaattgagcgtgttgccgcaaccggtccagttgtgataatcgccgtcttctcttatccaataatagctacggttatcgatcccacgcagcgagaataacgggccgtcgaggtccagttccgcactatggttgagcacgatatcaagaatgacttcgatacccgctttatgcagtgctttgattgcatcgcgaaactcatccagcgccgtttctggcgagcaggcatacgccggatgcagcgcaaacatcgccaccgggttgtaaccccagtagttacttagccccatgcgttgcagacgtggttcactggcaaactgcgccactggcagcagttccagcgcggtaatgcccaattgtttcaaatagttgatcatcaccggatgcccgagggctttataagtgccacggatctcgaccgggatctccgggtgcaagtacgttaatcctttgacatgggcttcataaatgatggtgctgccccacggcgtgcgcggcggggcatcatcttcccagtcatagtgatcaaccaccactacgcatttcggcgcaatggcggcgttgtcgcgatagtcaggttcattatgaccggcgtgcagcagcgggttatctttaaactccccgtcaatttgccgcgcgcaaggatcaatcaacaacttcgccgggttaaagcgatgcccctcggcgggttgccaggggccatgaacgcgataaccataacgcaaacccgggcgcgcatccggcagataaccgtgccaaatgtcgccactgtgccctggcaagtcatagcgatgttcctggccattggcgtcaaagacacacagttctacccgctcggcatgagcggagaaaagtgtgaagttgacgccctgaccgtcgtaatgcgcgccgaggggagcgggtttgccaatggcgagttgtgtcattctgcctcccgaaccagccagatagtggccagcggtggtagcgtcaggcttagtgaatgctgacgaccgtggctggcaatctcatcgctgtgtaccgtgccgccattgcctgcattactgccgtgatagtgcatggaatcggtattgaggatttcacgccatttgcccggctggtttatgccgaagcgataatcatgacgcggtaccggcgtaaagttactggcaacgatgatttcgttaccctctttatcgcgacgcacaaagatcagcaccgagcgttctttgtcatccaccaccagccattcaaagccgtacgggtcaaaatccagttcatgcattgctttatggtggcggtaggtgaggttcagatcgcgcaccagacgctggacaccgtggtgccagttatcgccgccttccaacagatgccagtcgaggctggcgtcatggttccactcgcggccctgggcaaattcgttacccatgaacagtagtttcttgcccgggaatgcccacatccagccatagtaggcgcgcaggttcgcgaatttctgccatgcgtcgcccggcatgcggtcgagaatcgattttttaccgtggaccacttcatcatgcgacaacggcaggacgaagttttcagtgtagttgtagagaatcccgaaggtcagtttatcgtgatgatactgacgataaaccgggtcgagcttcatgtagtccagggtgtcatgcatccagccgaggttccacttgtaccagaagcccagaccgcccatatcctgcggacgagaaacgccagggaaatcggtagactcctcagccattgtcaccgcaccggaaacctgctcaccaagaatacggttggtattacgcaagaattcaatcgcttcaagattctcgcgcccgccaaattcgttcgggatccactccccctctttacggctgtagtcgcgataaatcattgacgccaccgcatcgacgcgcagcgcatcaataccaaaacgttcaatccagtaaagcgcgttaccgacgaggaagttactgacttcacggcgaccatagttgtagatcagcgtgttccagtcctgatgatagccttcacgcggatcgctgtgttcatacaagttcgtgccatcaaattcggcaagcgcaaagtcatcagtcgggaagtggcctggcacccagtcgagaatcacgttcagaccagctgcgtgtgcggcatcaatgaaataacggaagtcgtcgcgagtaccaaaacggcgggttggcgcatacaggccggttggctgataaccccaactgccatcgaagggatgctcgttaatgggcagtagttcgaggtgggtaaagcccatccatttagcataaggcaccagttgatcggccagctcgcggtagctcaaccagaaattgttgtcggtgtggcgacgccaggaacccaggtgaacttcataaatagagattggcgcatcaaactgattcgcttttttgcgctcttcagtctgtacaaccttttccggcagcccgcaaataagagacgcggtttccgggcgcatttgcgcttcaaaggcataagggtcggacttcagacgcaagttgccattggcatcaatcatctcgtatttatagagctgaccgttatgcgccccagggataaacagttcccagatgccgctctctttacgcaggcgcatcgggtgacggcgaccgtcccagtagttgaattgcccaaccaccgagacccgacgggcgtttggagcccagacagagaaacgcgtacctgtgacgccatccatagtatctgcatgcgcgcctaaggtttcatacgggcgcaggtgagtaccttcagataatagccaggcatccatttcctggattagcggaccaaaacggtaaggatcatcaatcaggttttgctgaccatgccagacaacagccaactgatagcggaaaaaattcttacgtcgcggaatgacgccgctaaagaatccccgtgagtcgagacactccagttttgcgagtttgcgcccggttttcggttcaatcacccacacatcggtagcgtcgggtaaaagggcacggacttccagtcccgcggtggttttatgcattcccagtacggaaaaaggatccgcaaaatggcctgcaattagcgcgttaatcacgtctctatcgatacgatcggacatgcttgtcttcctgttttattgtgtcaccccatccaattggatttttgacttctggttgtgacatttttttgacctgaacggcgcagcactctgtgcatcctctctgcgtcgtcctcacttcaggtaaggctgtgaatactcatgtattcagccacccttaaagaatagccaatgctctatttaactcccggtaaatcatgaaacatctgcgcttactcctgtattacgcactaacaggggcggcatcgcgccccagatttaatgaataaagattacgccagttgacgaagcatccgacgcagcggctccgcggccccccacagcagctggtcgcccacggtaaaggctgacaggaactctggtcccatattcagcttacgcaggcggcctaccggcgtggtcagcgtgccggtaacggcagctggggttagctcacgcatagtgatttcccgatcgttcggaacgactttcgcccacggattgtgcgcagccagcagttcttccacggtcggaatagacacatcttttttcaatttaatagtgaatgcctggctgtggcagcgcaatgccccgacacgcacacataaaccatctaccggaattacggaagatgtgttgaggatcttgttggtttccgcctgccctttccactcttcgcggctctgaccgttatcgagctgtttgtcgatccacggaatcaggctacccgccagcggcacgccaaagttatccaccggcagctcaccgctacgggttaaggttgtgactttgcgttcgatatcgagaatagcagaggacggggtcgcgagttcatctgccacatggccatacagatggcccatctgggttaataactcacgcatatgtcgcgcaccaccgccggaagcggcctggtaggttgcaacggacacccaatcaacaagatcattggcgaataaaccacccaacgacatcaacatcaggcttacggtacagttaccgccaacaaaagtcctgatgccattatttaatccgtcggtaatgacgtcctgattgacggggtcaagaatgatgatggcgtcatctttcatgcgcagagacgatgctgcgtcaatccagtaaccttgccatccgctttcacgaagctttggatagatttcgttggtataatcgccgccctgacaggtcacaatgatatcgagggcctttagcgcctccagatcaaaggcatcctgaagtgtgccagtggttccgccaaaagacggcgcagcctggccaagctgagaagtagaaaagaagacagggcgaatggcgtcgaagtcgcgctcttcaaccatgcgttgcatgagaacggagccgaccataccgcgccagccgataaaaccaacatttttcataagcgtttttttcctgcaaagatgtgtgctgtataaatgtgccggtctcctcttggcacatctttcaccatacaaaaagcagccaaagtcgcaagtgaaattaatcaatgatagcgaagccatcagtaatgcgacttatcctgctttgttagcacgcagaaagtccgcggcaattatcagggaatttgagttatgaatgaaatcatttctgcagcagttttattgatcctgattatggatccgctcggaaacctacctattttcatgtccgtactgaaacatactgaaccgaaaagacggcgggcaatcatggtgcgagagttgcttattgctctcctggtgatgctggtgttcctgtttgcgggtgagaaaattctggcatttcttagcctacgagcagaaaccgtctccatttctggcggcatcattctgtttctgatcgccattaaaatgattttccccagcgcttcaggaaatagcagcgggcttccggcaggtgaagagccatttatcgtgccgttggcaattccgttagtcgccgggccgactattctcgccacgctgatgttgttgtctcatcagtacccgaatcagatggggcatctggtgattgctctgctgctggcctggggcggcacctttgtcatcctgctacagtcttcgctatttttacgtctgctgggcgagaaaggggtgaacgcacttgaacgcctgatgggattgattctggtgatgatggcaacccagatgttcctcgacggcattcgaatgtggatgaaggggtaacgaggagagtttttcgaaaagaacccggtagcgtcacaactaccgggcgaacaaacttaactcaacagctggaacgcaatcatcccaacgatggcaccgacagtgccgaggatggtttccatcatggtccaggttttcagcgtttcggcttcggtcgcgccggtaaatttaccgaacaaccagaaaccggcgtcgttaacgtggctgacaacaatcgaaccaccagcgatacaaatcgacagcgccgccatttgcgcaccggagtagttcagttgttcaataaccggcatcaccagtcctaccgccgttaaacaggctacggtggcagaaccctgaatgatgcgcactgcagctgccagcacgaagcaggtgatagcaatcggcaggcccatgccggttaacgcttcgcccagtgccggacctacgccagagtcaaccagcacctgtttgaacacgccgcccgcaccaatcaccagcagaatgatccccgccggttgcagcgcgtgaccgcaaatctccatcactttgtcttttggcatgccctgacgcattgccagaccgtaaatcgccaccagacaagcaaccagaatcgcggtaaacggatgaccgataaactcaaaccattcgtaagcagttgatccttccggcacaaaacgcgcggcaatggttttcagccctaccagcaccagcggcagcaggatcagcgacaggctgaatccgaaagatggcattttgccttcgccgagatgcggttcgctgatgtcgtcaggaatatgcagctcaacgtaacggctgatgaagttaccccacagcggcccggcaataatcattcccggaattgccgcacacaggccaatcaggatcatccagccaaagtcggcattcatctgcgatgccagcagcatcggcgctggtccaggcaccagaaatgccgccgctgccgccacgcctgcaaataatgggattaccagcttcaccaggttcgtaccggtgtggcgcgccattgagaaagcaacgctaatcagcagaactatcgccacttcaaagaacagcggtagcgcacagaccagccccgcaaggccgatggcataatgcgcgcggctgtgaccgaaggatttgagcattttgacggcaatctgatcgactgcgccggtttcatgtaagatcttgccaaacatagctcccagggcgacaaccaccgccaggaagccgagggtgcctcccatccctttttccatcgtcgctgcgattttatcgagcggcataccagaaaaaaggccagcccccatggacaccaccattaaagccaggaaagcgtgcatacgcgccttcatgactaaaaacagcagcagtaaaacagaccctactgctgttaaaacaagcgttaatgtagtcactacttatttgccttttttaataacctcaatggtgcttgccacaacaccttccagcggttgatcgatatccaccaccagtacatcggtttcgtccgcacccggctcctgcagcgtttcaaactgcgtcaccaacatttgggttttaaagaaatggcctttgcgcgctttcaggcggctttcaatcacatcaaaatcgcctttcaaatagatgaaagagagattcggattaccttcacgcagcaagtcgcgatagtgttttttcaatgcagaacagacgatcagcgacactttattagtgcgctgcatagcaaacgcggcgtcgttcagcgcctgcaaccacggtttgcgatcgtcgtcattcagtggttcgccagacgccattttttcgatattgcgccgtggatggaggaaatcgccatcaagaaacgcggcatgaagttgatgcgccacttcactggcgaccgcagatttgccgctgcccgatacgcccatcaagacgtaaatgtggtgatcatggttagtcgtgctcaaagtggtgcccccacaatacaagaattaaaaatgttacgggtaactgttatcggtaacattgtccagccggacaatatcagaagcaatatccatccatgccttaagtgtataagtgtgagctacttcaaatttgtgggcttaaatagatccgcccggtgacaaggtgaaacctaaatctaacattttcggtgtcacagattcgccacgaatacgcgccagcaggcgttcagcgccaatactgcccatccgctcacgcggcgtcagcacgctcgcaagtcgtggctccatcacctgaccaatgtcatgaccgtggaaaccggcaatcgccatatcgtcaggaacttttaaccccagacgctgacattcaaacgccgcgccgaccgccaggtcatcattcgtacagaacacgccatccagctgcggatattcccgccgcgcctggcgaatcagttcaataccggaagagtaagaagaagattgctcaaccatcacgctatatggcaccaggcctgcatccagcatcgcctgttcgtatcccttctgtttgatgatagtacgttcgtcgagacgtgcgccgagataggcaatgtggcgatgcccgcgagcaataatggcagtggtcatctggcgtgctgcttcaaagttatcaaaaccgacggcgatatcaaggcatggcgacttgctgtccatcagttccaccacgggaatacccgccacttcaatcatctttaaggtgcgcggcgtgtgggtacgttcggtgaggatcaggccgtcgatattccaggagagcatggattcgaggcgttcttgctccatttccggtttataaccgtagtgcgccagcatggtctgataaccgtgcgcgtcggtgacgctttcgattccgcgtaatacttccgcgaaaacctggttggtgagagaaggtaacaggacgccaatcgcccggctggtggcgttagagaggatatcgggcgcacgattgggaatatagcccagttcatcaagagccgcggcaatcttgccgcgtagagcgacggaaacctgctccgggttgcgtaaaaaacggctgaccgtcattttggtcacgcctacacggtcagccacatcctgaagtacgggtcttttctttttcatcgtcctgaaggtacaaaagagatagattctcttagtttaacacggacacatcagaaccttcccggggaaaacagtgcttgtttacaattattagatatacactaaatcaattgcatcgcattgtgctaacgacgcggcaaaaccccggaagcgtacatcagcacgcgaccggagcgagcgaggaagcctgcaaaaaggcaggcttcaaagatgccgttgagttttaaaccggcggcagatcgaacagtaacacttcgctgtcgctatccgcatggatggagattgcctgctcatcccagattgccagaccatcgctggtcgaggctttcacgccgttaatggtgacattgcctttcaccacctggatccagacgcggcgttcagcggcaatctgatgcaccgactgctcatctttcagcaacgcccagcggtacagttccatatcctgatgcactttcaatgaaccatctcgcgcatccggcgagagcaccagctgtttgccctgtacggcatcgaagcgacgctgttcataacgcggcgtaataccgttttcttcaggcatgatccagatctgatacagatgcagacgctcggtgctgcttgggttgtactctgagtgacgaatacccgtaccagcactcataatctggaactcacccgccggaacctgctctttattgcccatgctgtcctgatgctcaacagtaccttccagcacgtaggtcaaaatttccatatctttatgcgggtgagtgccgaagccctgccctgcttcaatcacgtcgtcgttaatcacgcgcagcgcggagaagcccataaagttcggatcgtaatagttggcaaaagagaaagtatgccaggagtccagccagccatgatttgcatgaccacgttcatttgctttgcgtaagtagatcatttgtattcgccccctgaatgatttcgatgggcttagtgtggacccgatctgcctgggatgatagagggtgaaaattgacccctctgttcaaaaaaattgaactattcgaggggccatcaaacttacttagcgagagttactgtggagggagaggcttgctcaaatccgcgttcaaggatttccagattggtaagaacttcagattccttgacgtaatttggcgcaccgtgggtgatggtttgatacaacgcatcataaacgcgcccgtaatcgcccatctccggcttcatctcttctctgaccgtcacgccctcgtcattgacatactccagcacaccgaccgaatcatccgctgcgaatcccggttcgcccggcataatattagccttcaggctggtttcctgctggtcgataccgtatttaataaacgaacctttcttaccgtgaacgataaatttcggataatcgattttcaccagatggctggttttgacgatggctttcaggtcgccataaaacagttgcgcttcaaaggtgtcgtcaggattggctttattacgcaggctgcggatgtcataagcgacgtgatccgggcgaccgaacagagaaataatctggtccatcgtatgcacaccaaggccataaaacgcgccatcctgcggcagcccaggtttggtttctgccaccgggcggtaatagtcaaaatggctttccacttcaacaatctctcccaacttgccactttcaatcgcttttttcgctgtcaggaagcaggagtcaaagcgacgattctgatacggcgtgacggtcagccctttgcttttcgccaacgcaaacagctctttcgcctgcgcaagtgtcggagtgaacggtttttcgaccagcacatttttcccggcttccagcgcgcgtttcgcgtactcgaaatggctgtccgcgtgggtgcagacaacaaccagcttaacatcgggatcgtttagtacttcgtcgagatcgctggtgaaatggatatgggaataaatgggagcctgttcttccggcttcgcatggcgacgaaaaatatgcgcgacatgccagctatccttgcggttaagtacatacggcagatggtaacgggtggtgcttttgccgaagccaataaaggcgcagttgatgaccatgatttcgtcctttttaaggtggttatttacaccttagcgcaaagcggacgtggttcctactggagtgcgcataacgaacacaagcactcccgtggataaattgagaacgaaagatcaaaaaaaaagccagcacccggctggctaagtaatactggaagcaatgtgagcaatgtcgtgctttcaggttctccgcgagggtcttcctgatcgcgagacaataataatcattctcattcgcacttgtccaacactttttgcaaaaaaatgcatttgactcgcatttgaaagtcaatgatgttgaaagggacatttaccccaaagaggacaaaggaatgagtgagatagtaatacgccacgcagaaacacgggattacgaggccatcaggcagattcacgcccagccggaggtgtattgcaacacactacaggtgcctcatccttccgatcatatgtggcaggagcgactcgccgatcgtcccggcatcaagcaactcgtcgcctgtattgatggagacgtcgtgggccatctcaccattgacgtgcaacagcgcccacgccgcagtcatgttgccgattttggtatctgtgtcgactctcgttggaagaaccgcggcgtcgccagcgccctgatgcgagagatgattgaaatgtgcgacaactggttgcgggtagatcgcattgaactaaccgtgtttgtcgataacgccccggcaattaaggtctataaaaaatacggctttgaaattgaagggactggtaagaagtacgcattgcgtaatggtgaatatgtcgatgcatattatatggcgcgggtgaagtaagatagtgccctttttctgagatggaaaaagggtgtcattcaaaatcgacataccttcctttaaggtatttatttgcccaatacatatattgagatttaactcataattacttcctaaagtgtaatattttattttttaatatatacgcctacaatttcctggagtaaataaataacaattaacaagcataatattgccattgataaaatagcatgccataaaaggacttttcagggatgagtaatattgtttacctgacagtaacgggagaacaacaaggaagcatctccgcaggttgtgggacttctgagtctacaggtaatcgttggcagagcgggcatgaggatgaaatatttacattctcactcttaaataatattaataatacggggcttggttcacagttccatggtataacattttgtaaattaattgataaaagcactccattatttattaattccattaacaataatgaacaattatttatgggatttgacttctatcgaataaatagatttggtagattggaaaagtattattatatacaactaagaggcgcttttttatcggctattcatcaccagatcattgaaaaccaactggatacagaaacaataactattagttatgaatttatcctctgtcaacatcttatcgcaaataccgagttcagctatttggcactccctgaaaattataaccgtttgtttttaccaaattcaaaaaaccaaacaaataatcgtttcaaaacgttaaacagcaaagctattggcaggctacttgctgctggtggcgtatacaatgggaacattgaaggattcagagatactgcggaaaaactgggtggagatgcaataaaaggctatgatcaaatactaaatgaaaaaacagcgggcatagcgatagcaacagcatctattcttttaacaaagcgttctaatgttgatacatatacagaaataaatagttacttaggcaaacttagaggtcaacaaaaacttcttgatggtatagacataatagaaataatatacattaagagaccttcaaaagacttagctaacttacgaaaggagtttaataaaactgtaagaaaaaattttcttatcaaacttgcaaaaacctccgaagcatctggaagattcaacgccgaagaccttttaagaatgagaaagggcaatgttcctctaaattataatgttcaccataaactatctctagatgatggtggtactaatgatttcgaaaatttagtattaatcgaaaacgaaccatatcataaagtttttactaacatgcaatcacgaatagctaagggaatattagtaggtgaaagcaaaatcactccctgggccattccatctggctcaatttatcctcccatgaaaaatattatggaccacacaaaatgatgactaaaacccaaataaataaattaataaaaatgatgaatgatttagactatccatttgaagcaccgctcaaggaatcatttattgaaagtataatccaaatagaatttaattctaattcaactaattgcctggagaagttatgtaatgaagttagtattctttttaagaatcaacctgattatcttacttttttaagagcaatggatggattcgaagttaatggattacgattatttagcctctcgattccagaaccttcagttaaaaacctttttgccgtaaatgaattttatagaaataatgatgatttcataaaccctgatctacaagaacggttagtgatcggggattatagcatttcaatatttacttatgacattaaaggtgatgctgccaacttactgatttagtgtatgatggtgtttttgaggtgctccagtggcttctgtttctatcagctgtccctcctgttcagctactgacggggtggtgcgtaacggcaaaagcaccgccggacatcagcgctatctctgctctcactgccgtaaaacatggcaactgcagttcacttacaccgcttctcaacccggtacgcaccagaaaatcattgatatggccatgaatggcgttggatgccgggcaacagcccgcattatgggcgttggcctcaacacgattttacgtcacttaaaaaactcaggccgcagtcggtaacctcgcgcatacagccgggcagtgacgtcatcgtctgcgcggaaatggacgaacagtggggctatgtcggggctaaatcgcgccagcgctggctgttttacgcgtatgacagtctccggaagacggttgttgcgcacgtattcggtgaacgcactatggcgacgctggggcgtcttatgagcctgctgtcaccctttgacgtggtgatatggatgacggatggctggccgctgtatgaatcccgcctgaagggaaagctgcacgtaatcagcaagcgatatacgcagcgaattgagcggcataacctgaatctgaggcagcacctggcacggctgggacggaagtcgctgtcgttctcaaaatcggtggagctgcatgacaaagtcatcgggcattatctgaacataaaacactatcaataagttggagtcattaccgacattaaaagtaacttttttgaaattagagataatattggcacagaaaatatattcagttcgtttagtgatttctcttcattcttaaacgaaatcatggacagttgttcataataatcaaaaggaaacaaaaatcattgtaaaccatgccatctttttagagattaccagcagaaaattccttgttcgaaatttagcagtgcaagctatggaaaaacttacaacggaactacactccttaagtgagatggaccgaagacatgtagtctctattttagccgaaatagctaatggctatgatgattttaatgacatgttgatttatttagaattttacccgaatcataagattctgatatcttaaataagaaaatcccgttcgacgttctgaaaaagaaatcataaaatattagcagatacttatttcgtgactatatcttatccgatgaacttttttcaaaaccagcatttaataatatctttgacgaagatgaacgcgtctttgctcaatgtatcacacaggaataataatataacactcaacaataatatttattataattatgattacttatcacgacgcattcgcgaaagcgaaccattaccttgatgatgcagatctcccggtcgtcattactctacatggacgctttagccagggctggtatttctgtttcgaagcacgagaatttctcgaaactggagatgaggccgcgcgcttagctggtaacgcaccttttattattgataaagacagtggtgaaattcattctctgggaacggcaaaaccgctggaagaatatctacaggattacgaaataaaaaaggctaccttcggcttgccctgacaaaatagccctcttcccacgaagagggccgctaaccttagtaccccgccgttaaatcatccaccgagcgcgggtcggatgcgccgtacaactcaccgtccggcccaaccataatgctttgtgtactgcccatcgcctctttcagcgccactttctgaccttttgcttccagcagcttgagcgtatccgggctaaaccctttttcgacacgcagctcgtccggcaaccactgatggtggaaacgcggcgcattggtcgcttcggcgacgttcaagccataatcgatgctattcaccaccatttgcagcactgtagtgatgatccggctaccgcctgggctaccggtaaccagccaggttttaccgtctttcaccacaatggtcggcgacatcgacgacagcgggcgtttgttcggcccgacggcgttggcatcaccgcccaccagcccgtaaacgttcggtacgcccggtttggcggagaaatcatccatctggttattaagcagaataccgctctcgcccgcgacaatgcccgtaccgaaggtggtgttcagcgtataggtcaccgccaccgcgttaccatctttatccaccactgagtaatgggtagtttgattactctcataaggcgcaagcttgccggggcgaatttcgctggatggcttcgctttattgatatcaatttgatcggcaatagatttggcataggctttattggtcagcgcctgccacggtactttgacaaaatccgggtcgccaagatattccgagcggtcggcgtaggcgtatttctccgcttctgccatgatttgcatcgcatcggcgctgccaaagccgtatttcttcatatcgaagttttccagaatattgaggatttgtacgatatggatcccgccggaggatggcggtggcatggagtaaacctgatacccgcgataatcgccgcttatcggagtgcgttcgaccgctttataggctgctaaatcttctttagtgatcaagccaccgtttttctgcatctcctgggcgatctgttccgcaatcgtgcctttatagaattcgtccgggccgttttcagcaatcatctccaggctctttgccaggttcgcctgcaccagcgtgtcgccctttttcagcggctcgccctctttccagaagatagctttactgttttcgtgattcggcaacacttcgctaccgtaggttttgagatcgtcagccagcgcgtcgttaacgataaaaccatcgcgtgccagtttaaacgcgggctgcacgactttgttcagcggcatggtgccgtatttatccagcgccagcgagaaacctgctaccgtacccggtgtgccggaagccagatgcgaagtgagtgattttttgctgtccgggttgccctgatcatcgaggaacatatcgcgggtcgctttggcgggtgccatttcgcggaaatcgatagccgtggtattgccatttttcgagcggattaacataaaaccaccaccgcccagattccctgcctgcggatgcgttaccgccagcgcgtagcccaccgccacggcggcatcaacggcattcccgccctccttgagaatatccacccccacctgagtggcagtggcgtccacagacgctaccattccctgtttcgcgcgtaccgggtggaagacatcttcctccacaccatacgagacgggcggcgcaggaggcgcggcggcggcgctaaaacaacttcctgagagcagagcagcaatggccacccggcgtaaaaacgtcggttttatcatcgttattctccagagattaaggggcaaccccagctaagcctggtatataactctgaattaatcatcgttttgtcgggaagcgagtaaacttaaaggatatcttcagaggaggatacgcgatgaaacgacttctgattcttacggcactcctgccgtttgtcggctttgcacagcccattaatactctgaacaaccctaaccagccggggtatcagatacccagccagcagcggatgcaaacccagatgcagactcagcaaatccagcaaaaagggatgctgaatcagcaactgaaaacgcaaactcagttgcaacagcagcatttagaaaaccagataaacaataattctcagcgggtgttgcagtcacagccgggggagcgaaatcccgcccggcagcaaatgctgcccaacaccaacggcgggatgttaaacagcaaccgtaatccggatagttcgttgaatcagcagcatatgctgccggagaggagaaacggcgacatgctgaatcagcccagcacgccgcagcctgacattccgttgaaaactattgggccgtaaagttcggaccaatcacgtcaatcgcatcggtacagatgcaatccacaccccagcgcagcaactctgctgcgcgctggggtttattgacggtataaaccagaatccgcagtccggcgtctttcaactgcatcactcgcgctttattgagtaacttatgattgagatgaatagagacgcagcccagccgcgcggtcagttcgcgccagtcgtcgcgccactcatccagcaacaaaccgcgcggcagttccggtgccgcctgttgtgcagcttctaaagcatcaatctcaaacgatgacagcagcggcggcgtcataccggcccacagctcgcgtgccgccagcgccaccattttgcccgttaatggcccggtgccggtggtgggtttgatttcgatattcgccatcatcccgtgttcgcggcaacgttccgccacctgcgaaagcaacggtagcggctcacctttaaacattttgctgtaccaactgcccgcatccacgcgcagtaaatcctgccagttcagttcacccgcgacgccccagccgttgctggtacgttcgagattgtcgtcatggagcaggaagatctcgccatctttcgataacttcgcgtcaaattcgatcatcttatgaccgtattttgccccgacgtcgattgacgccagggtgttttccggggccagcttaccgccgccacgatgagcgacgatgcggggataaggccagttactcatactcgttgtcctgtttcaccatcaaaaagatgcagctgattttccgccagatgcagccacagcgtgctgcctgccgtcgggcgctcctgatgcgccagtcgcaccaccagcttctgctcgccccagcgtccgtgcgccaggttatctgcgccgaggatctccagcgtgtccatcaccatcggtacgccgccttctgcctgcgagcttagcgcaatatgttccgggcgaatgccgagagtcattttacgcccggcatactgacggtagccaccgtttagcggcagctcaataccgccgtccagttcgaaatgcgtgccttcgttattcacgcggcctgtcagcaggttcatcgccggactgccgataaaactcgctacaaacaggctggcgggcttttcgtagacttcaactggtgtgccaatctgttcggcaacaccgccgttcatcaccattactcgctgggcgagcgtcatcgcttcaacctgatcgtgagtaacgtagagtgaagtcgttttcaggcgacggtgcaactgttgcagttcaagacgcatctgcacgcgcagcttggcatcgaggttagagagcggctcatcaaacaggaacaccgccggatcgcgcacaatcgcgcggcccatcgccacacgctggcgctgaccgccggaaagctcgcgcgggcgacgtttgagcagaccgtccagctccagaatgcgcgccgcttctttaacgcgctcggcaatttgctgcttgcccatgccgcgaattttcagcccccacgccatgttttcttcgacactcatatgcggataaagcgcgtagttctggaacaccatcgcaatcccgcgatcttttggctccatttcagtcacgcgctggtcgttgatccagatatcgccttctgtcacccgctccagcccggcaaccatgcgcagcagcgtcgatttcccgcagccagacggcccgaccatcacgataaattcgccatccgccacatcaagggtcagcggtttaatgacctgggttttaccatcccagcttttggttactgcctgtaatttcagtcctgccatcttatttctcactatcgaccaggccgcgcacgaaggcacgctgcatcactaaaacaatcaccaccggagggataagcgttaacaacatcgccaccatcactgagttccattccgtggtgccttcgcctgtagcgatcatccctttgatccctgccacggtggtgccgagatccacatcggtaataatcaacaacggccacaaatactgattccagccgtagataaaggtgatcacaaacagcgccgccagattagttttggagagcggaaaaacgatgtcgcaaaagaagcgcattggcgatgcgccgtcgatccgcgcggcttccaccagctcatccggcagcgtcataaagaactggcggaacaggaaagtagcggtcgccgaggccatcagcggcagcgttaaaccggcgtagctgtcgagcatctgcaggttggcgatgacttccaccgtcgggaagatacgtacttcaaccggcagcatcagggtgataaaaatcatccagaagaagaggttacgtagcggaaaacgaaaccagacaatggcaaatgccgagagcatcgagacggtaattttgccgagcgtaatgctgaacgccatcacaaagctgttaagcaacatccgccagaacggcgcgctattcgtgcctaccccgttcacccagatgttgtggatgttttccagcagatgtgtgccggggatgagcgtcatcggcgcggcatagacggcctgtttatccagcgtcgccgcgacaaacgccacgtacagcgggaagaggatcaccgcgatcccgaggatcagcatggtatggctgaatatcgtcagccacggacggttctcaatcattggtaacgcaccttgctttcaacatagcggaactgcaccaccgtcagcacgatgacgaggaacatcaacaccaccgactgtgcggcagacgaagccagatccagtccggtaaaaccttcgcggtagatcttataaatcagcgtcgtggtggcctgaaccggcccgccggacgtggcggcgtcgatcaccgggaaggtgtcgaagaaggcatacaccaggttcactaccagcaggaagaaactcaccggggcgataagcggcagcgcaatcttaaagaagcggcgaatcggccctgcaccgtcgatggctgcggcttcgatcaacgaacggggaatggattgcagcgcggcatagaagaacaggaagttgtagctgatttgcttccatactgaggcaaacaccaccagaaacattgcctgaccgctgttttgcgcgtggttccagtcgtagccgaactccgcgagaaaatgggtgatcagcccgcgaccggggttaaacaggaagatccacaatacggcggcaacggcgggagccacggcgtaaggcagcaacattaaggtttgatagaaacggctgccgcgcacgatgtactccaccagcgccgcaaagaacagcgataccagcaaaccgctgacggtgacaaaggtgctgaattttatcgtcgtccagaaggagtcgagatagtagctgtcatggaacagcgtgacgaagttatccaggccgacaaactggctggagaaaccaaacggatcgacgctttgtagcgagtaccacaacgcttcgcccgcaggccagataaaaaagataacggtgatgatgagctgcggcgcgaccagcagataaggcagccagcgcgagcggaacaccggacgggatgatgacattacggttaattcctgaactgtgccggatgcgcttcgcttatccggcctacacgcgatgccaggtcagataagcgaaacgcatccgacattacactgattaagacttcgtcgatttctcaaagcggcgcagcaactgatttccacgctcaacggcggtatccagtgcctgctgtggtgtcttcttaccggtccacacgctctccagctcttcatccacaatcacgcggatctgcggcatgttgcccagacgcagccctttggtgaacggcaacggcggcttattcagcatctgacgcgtcgcggtatccgcccctgggtttttctcataaaagccctgctcacgggtcaggtcatacgctgctttggtgattggcagataaccggttttctgatgccactcggcagcgttttctggcttcgcgaggaaatcgaggaacttcgccacaccggtatacgtttctttatctttaccctgcatcacccacaggctggctccgccgataatggcgttttgtggcgcatctttcgcatcggcgtcgtaaggcatcatgcctacgccgtagttaaatttggcgtactcgcgaatgttggcaagagaaccggaagaggcggtggtcatcgcgcaatcaccgttatagaacttctcggtggattcatccttacgaccgacgtagctgaagtcgcccttcttgttcatctcctcgagcatggcgatgtgtttcacctgctccggcttattgaactccagcaccgcgtccgtgccgtcaaagccgttgtttttgctggcaaacggcagaccgttccaggcgctaaagttttccagttggatccagccctgccagccgctggcgtagccgcacttcatgccggaggctttcagtttcgcggcatagtccgccagatcctgccaggttttcggcggctgttccgggtctaatcctgctttcttgaaggcgtctttgttgtaatagagaacgggggtcgagctgttgaatggctgggagagtaagtggcccgttttgctgtcggagtagtaacctgaaaccgtcggcacaaactgcgactcatcgaactgaatccctgcctctttaaacacgtcatacaccggtttaatggctttcgacgccatcatggtggcggtgccaacttcataaacctgcaaaatagccggcgcgttgccggtacgaaatgcggcaatccccgcgcttaaattctgttcgtagttgcctttataggtcggtacaattttgtaatccgggttttcggcgttaaaacgttgggccagagaatccacctctttacccagttccccttccatagaatgccagaacggaatggtcgtcactgcctgtgcattccccattaacgccagtccgagcgccagtgctgaagctgtataatgtaacggtttcatcgtttatctctcttgttgtaccgaatgcgcgaattcacgcgttttatgctcgcggggtaacatgacatgctcgaattacagaaaaataacttttttgttacatttgtaagatagtaaggtgtcagaaagatgacaaggcggtgacggcgtgggtgagggaaaatgggagatggggcacggataagcgggaaaatatagaaggtctgaatcaaactctacagattgctcatcgtttcatgccggatgcggcgtaaacgccttatcaggcctacaagatcgtgcaaattcaacatattgccactcacccagtaggcctgataagcgcagcgcatcaggcaattttacatttgtcacctgtctcaaaggagtcttttgactccctatcaatcaacgtgttattacccgcctaaatacgcacttctcaccgcttcattcgccagcagcgcatcaccagtatcggaaagcactacatggccgttttccagcacgtagccgcgatccgccagctttagcgcctggttggcgttctgctcgacgagaaagatagtcatcccctgctcgcgcagctgctcgatggtgtcgaaaatttgctggatgataatcggcgcaagaccgagcgatggctcatcaagcagtagcaaacgcgggttgctcatcagcgcacgaccaatcgccagcatctgctgttcaccgccggacatggtgcccgcccgctgaatacggcgctcatgcagacgtggaaacagctcatacacccactttatgcgctcctggaactggtcgcgttcagcaaaaaaaccgcccatcgccaggttctcttccaccgtcatccgcgagaagacgcgacgcccttccgggacaatcgccaccgcttcgcgcatgattttcgctgtctgccagtcggtaatgtctttatcatcaaacacaattcgcccgctggtggcacgcggatcgccgcataacgtgccgagcaaggtggttttccccgccccgttcgcgccaatcagcgtgacaatctcgccctgattgatatgcaggctcacctcatgcagcgcctggattttgccgtagtgggcgctgactttgtcaaaggacaacatgactttttccatcttatgcctcacctaaataggcacggatcacgtccgggttattacggatctgctccggcgtaccgtttgccagcggcgtcccctgattgaccacgtaaattcggtccgaaattcccatcaccagcttcatatcgtgttcaatcaacaagatagtggtgttgtgatgattgcgcagttcggcaatcagctcatccagctctttcgtctctttcgggttaagacctgccgcaggttcgtcgagcattaaaatctccggctgcgtcaccatgcagcgggcaatctcaagacggcgctggtcaccataggccaggttactcgcctgacggttggcgtgttccagcaaaccaatgcgctcaagccaggtcgcggcgcggtcgagcgcttcgctctgggcgcgacggaaggatggcgttttcaacaggccagagaacagcccggttttcagttgctgatgctgcgccaccagcaggttttcaattaccgtcatttcacggaacagacgcacatgctggaaggtgcgcaccacgcccatgcgggcaatttgctgccccggtaaaccttccaggtgctgatcgcgcagtaaaatggtgccgccggtgggtttgtagaatccggtcagacagttaaaaaccgtggtttttccggcaccgttagggccgattaacgagacgatctcctgcgggtacagttcaagattgacgttgttcaccgccagcaggccgccgaagcgcatcatcaggccgttaacagataataatggctgactcatgcctgctctcctttcgctgcgccgtttttcagcttcagttgcgggcgcgtcatgggcagcaagccctgcggacgccagatcatcatcagcaccatcaaaccaccgagcattaacatgctgtattcgttgaaatcacgcatcaactcgcgcgacaccaccagcaaaattgccgccagaatcaccgcaaattgcgagcccataccgccgagcaccactatcgccagcacaaacgccgattcggcaaaggtgaaggattccgggctgacaaagccctgacgcgccgcaaacagcgttccggcaaaaccggcaaacgcggcacttatggtaaaggcagtcagcttgatacgacgcgggcttaagcccagcgaacggcaggcgatttcatcttcacgcaacgcttcccacgcacgccccagcggcatccgcagcaggcggttaatgacaaacaggcttagcaccaccagcagcaacgccaccaggtagaggaagatgacacgatcggagggatcgtatttcaggccaaagaaattactgaacgtgtcccagccgccttcacgagcggtacggctgaactcgagtccgaagagtgtcggtttcgggatctgactgattccgttcgggccgccggtaatttcggtgttattgagcagcaatatgcgcacaatttcgccgaaaccgagggtaacgatcgccagatagtcaccgcgcaaacgcagcaccggaaaaccgagcaggaagcccgccgccgctgccattaatccagcaatcggcaggcaggtccagaagcccaagccgtaatagtgattgagcagcgcaaaagtgtaagcgccgatggcgtaaaaaccgccgtaccccagcaccagcagaccagaaagaccaacaaccacgttcagcccgagaccgaggataatgtagatcatggtcagggtggcaatatccaccgtcccgcgtgaaaccataaacggccacgccaccgcaagcaccaacagcgccacgaggaacagtttctgcttcaccgtggagccatcaatggcgggcagaataaacttcggtccggaaacgcttttcaaccctttctggaaagccggtcgcaaaagctggaagaaaaagaccaccgccgtgccgataaacacccactgccaacggacatccgaagccgtgtcgaccaccagtttggtgccatccagctccagttgcacgcccataaagacgcccgccagcacaaagaacatcgcggcagagagcagcgccattgcaatatgcatcggtttcatactttctctacctccgggcgacccagaataccggtcggcatcaccagcagcaccagaatcagcagggcgaatgagaccacatctttatattccgtactcagataggcagaagagagcgcctccgcaatccccagaatcaggccgccaatcatcgctcccggaatgctgccaatcccaccgagcaccgccgcggtaaaggctttcatcccggccataaagccgatgtaggggttaatgacgccgtagaactgaccgagcagcacacccgccaccgccgccatcgccgcgccaatcacaaaggtcagcgcaatcacccggtcggtgttaatgccaagcagactcgccattttcagatcttccgcgcaggcacgacacgcgcgacccatgcgggaatagcgaatgaaaatcgtcagcgccagcatggcgaggaaggtaacaatccagatcaccgcctgcatggtggtaatagaggcagagaagttttcgctatgccccaccacccactgaccgttaaacaggctcggcagcgccacgtcgcgcgaaccttcggtcaggctgacgtagttttgcaggaagatggacataccgattgcagagatgagtgcaatcaggcgcttagagttacgcaccgggcggtaagccacccgttcgatactccagccgtaggcgctggcaatgacgattgcgccgacgaatcccgcagctaccagcagccagccggtatcaatgcccatcatcatcagcgcggcgatgatcataaatgagacgtagctgccaatcatataaacctcgccgtgggcgaagttgatcatgccgataatgccgtaaaccatggtgtagccgatggctatcagcgcgtaggtactgcccagcgtgacgccgttaaacatctgctgcaagaaatacaaaaactgctcagacataaggtaacctttctaaacccgcccgcattttacgggcggtgggatgatcacttggctgccgtggatgaaccgtcggcgtgccactggaagacaccaaaatcaaatcccttaagatcgcctttttcatcccagttcagcggcccaatcacggtgtttgcaccgttagcttttaaatctttcaccagcgccagcggctcatcgctgccggtacgctcaagggcagtcgccagagattgcaccgccgcgtaggtgatccagacataaggcccggacggatctttcttgtctgctttcagcgcatcaacgatgccctggtttgccggatcctggtcatagcgttttggcatagtgaccaacatgccttcggcggcatcaccggcaatgttcgacaacgacgcattacccacaccttccggccccataaactgggttttcaggccaacggaacgggcctggcgcagcatctgccccatttccgggtagtaaccgccgtagtaaacgaagtcgatgttttcttttttcaggcgggcgatcagcgcggagaaatctttctccccggcggtaataccgtcgaagaagacgacgttggcgttagccgctttcagcccgtcctgcaccgaacgcgccagcccttcgccatactgttgtttgtcgtgaatgatggcgatgcgctggggcttcaccgtctcaagaatgtattttgccgccgttggcccctgggaagagtccagcccggcagtacgcataatgtgttgataaccgcgttgggtcagctccgggttggtcgctcccggcgagatcatcagaataccttcgtcttcatagatatctgacgcaggctgggtagaagaagaacacagatgaccaataacgtatttaatgccgtcattaacgattttgttggcgaccgcaacggcttgtttcgggtcgcatgcgtcgtcatattccacgccaaccagtttatcgcccttaattccccctttggcattaatgtctttaattgcctgacgcgcgccgttaaattccatatcgccccactgggcaatcgggccggacatcgcgccgacaacggcgactttaatatcgtcagccatagcggtgtgtgaaattgccagtgcaatcatccctgcgatgatagttttcgcattccgtttcatagtcaaaaatccccattcgtgatgttgtgttgctttgtttttatgtgttaacaaatcagactgttctttttttatactgcactgtttttgcctgtctgattaaggggttagcgcagtattttgtgataatagcgattaaaatccctatttttcagtcgattaagaacagataatattctgaatttattgatagataaacagaaaaaagtgcctttgtcagcataaaataacggcacaaagggcggaataattcactatcattcaggggattatgctggacatttttcattctctaatgttttaattttgtaattattgctgttaaaaaattaatcacctgccaaaagaaataaaaaagagaaagcctccgattaaattatttcgctacactggttccacttttgtgatttacacgggttacccatgaagctgaccatcattcgattagaaaaatttagcgaccaagaccggattgacctgcaaaagatctggccggagtattccccttcctcgttacaggttgacgataaccaccgtatctacgccgcgcgttttaacgagcgcctgctcgctgccgtgcgggtaaccttaagcggcaccgagggagcactggattccctgcgcgtgcgggaagtcacccgccgtcgcggtgtggggcaatatctgctggaagaggttttgcgtaacaatcctggcgtttcatgctggtggatggcggatgcaggcgtggaagatcgcggtgtgatgacggcgtttatgcaggcgctggggtttacggcacaacagggcggctgggagaagtgttaatcgtcaagtttgatttcaaaagtgatattgcctgatgcgctacgcttatcaggcctacaatgtgtgttgcaatttactgatttctttggatcttgtaggccggataaggcgtttacgccgcatccggcatgaagcaacgtactcgatattagcaatttggcggcaacccaaagttgccgattaatgattacttcgcatcggtcgccgtgccgttggcgtgccagtcaaatacgccgaactcaaagcctttcagatcgcctttctcatcccaggtcagcggtcccattacggtatccacggagttcgctttcaggtatttggcgatttcagccggatcgtcagactgattcaggcccgcctgcaaagattgcagcgcggcgtaggtggtccaaacgaatgcgccacttgggtcctgttttttcgctttgatcgcgtcaacaatgggtttgttcgccggaacctgatcgtagttcttcggcttggtcaccagcagcccttccgctgattcgcccgcaatgttagacagcgaaacgttagccacaccttccggccccataaactgagttttcagccctgccgcgcgtgcctgacgcaggatttgccccatttccgggtgataaccgccgtagtaaacgaagtcgatattctcttttttcagacgcgccaccagcgttgagaaatctttttccccggcggtgatgccatcaaagaacaccacgtttgcattgcctttcttcaggccgtcctgcaccgctcgcgccagaccttcgccgtattgctgtttgtcgtgaacgatagcaatacgctgcggtttcactttctcaagaatatatttcgccgccgtcggcccctggtcggagtccaggccggtggtgcgcaggatcagctgatagccacgggcggtcagctccggcgcggttgccgctggggtgatcattaaaatgccttcgtcttcgtagatgtcagacgcaggctgcgttgatgaagaacagaggtgaccaatcacatatttaatgccgtcgttaacgactttgttcgccaccgcaaccgcctgtttcgggtcacaggcatcgtcatattttacgatttgcagtttgttgcctttaatgccgcctttagcgttgatatccgcaaccgcctgctctgcgccggtaaactcctggtcaccgtactgcgcaaccggaccggacattgcgcccacgaccgcgactttaatatcttctgccagagccatattgctgaatgccagcgcgatacatcctgccagtaacgctttaccctttatgttcatcctgagaatccccattcttctggttattacgtgtgttgtgatgttgtttttcagcactttatttcgttttatgcatgactacccgtgctttagcagcatactctgctaaaacatacccgatttttatgatattggaatagctattttgacagtttattaacaatctgcgtggggattggcgttttgccggaggggaaattgattattacagaggcccaaaaaacaaaaaccccggactctcatccagggttctctgcttaatagcggaaattacgcttcaatggcagcacgcaattttttcatcgcgttcttttccagctggcgtacacgctcagcggaaacgccgtaacggtcagccagttcctgcaacgtggacttgttgtcttcgtccagccagcgcgcacggatgatgtcctggctgcgttcgtccagaccctgcatcgcgtcggtcagacggtttgccgcctgctcttcccagttatcatcttcaatgccgtcggcaaagttagatgatttatcctgcagatagagcaccggagccatcggctggctgtcggaatcgtcgtcggaagacaggtcaaaggtcatgtcctgtgccgccatacgtgattccatctcacgtacgtctttgctggttacgcccagttcacgggccaccatttcgacttcatcctggttaaaccagcccagacgctgcttggttttacgcaggttgaagaacagtttgcgctgcgctttggtggtcgcaactttgacgatacgccagttacgcagaacgtattcgtggatctctgctttgatccagtgaacggcgaaggagaccaggcgcacacccacttccgggttgaaacggcgcactgctttcatcaggccgatgttaccttcctgaatcaaatccgcctgtggcaggccatagcccgcataattacgagcaatatgaacaacaaaccgcaggtgagacaggatcagcgttttagctgcttccagatcgccatggtaatgcagcttttcagccagcgcccgctcctcgtcagccgacaacatcggccacgcgttagctgcccggatgtaggaatccaggttgccaactggggctaaagctaaactttgcattttgtcagtcattcaaatcctctcaatcgatatcttctggcgcttcagtggtagcaacaactgtgccagagcttaagagcaacgaggttatcattcactgttttatcagaccgtgattttatccacaagttcaatgcaagcttgtgaataaattacgcacaaaatgtgacatagagatgaaataccgggaagagacaacggggtctctttccctgctacggaacccattgcagggaaagagtataacacgcttttattattcaggcgtaaagtggcgtaaatgttgtaccgtggcaagccacgctgccacccagccaatcatcgagcataccagcagcaatagcaggcattcatcgaatgataagccattgatatcaaacttcgttccgaaaacctgtgccacttccgcaaccgccgatgacaatcgcagcaccagaatttctgacaaaattaatgacaacaatgcgccagaaaatcccagcagtgcgccaccatacaggaacgggcgcaggatgaatccatctgtcgcaccaatcagtttctgtacgttaatggagtcacggcgagcaaagatactcagacgcacactgttaccgatgacgaggaacacggccgccaccatcaacacgccgatcatcgccgaaacgcgcccgaccagcccggtcaacgccgccagacgggcaaaccagctgtcatccatccgcacttcgtcaatgccgttaatctgcgtgatacgatcacgcagcgtattcagtgattccgtcccctggaaatcgagtttcgggatcaccaccgccactgccggaagcgggttttcttccagcatatccagcgcaccaccaaaaccagaccagttacggaactcacccagtgcgtcttcacgagaaagatagttcactttctccacgccttgctcggcctgcaactgtgccaccacgcccgcagcagcgtcatcgtccagcgttttttgcagataaacagtgatttgcggtgacggataatactgcgtcgccgcctggttaacgtttttgtacaccatataacagacgctgggcagcgtcagagaaatggcgataaccatcaccgttaaaaacgtggcgaacggtttgcttttcagatcctgcaatgcgccgtggaaggcatagcgcacctgttcgttgaaaacgttggttttgcgatttaccggttttggcgaggatttcgcgcgttttggtgcgttacgaccgccgtcgcctgagccgccgaccgatttacggaagcgatcaagacgcccgccaaactgccgaatatgattgattgcatcgcgcttattcatggcccacgcctccatgcaagtgaccatcgctcagggtgagcatgcgataggaacgccgcgagatcaggttgatgtcgtgcgttgccatcaatacggttaccccaacgcggttaaactcttcaaacagacgtaaaatgccttccgacagcgcgtcgtccaggttaccagtcggttcgtccgccagcagtaccgcgggcttgttcaccaccgcgcgggcaatgccaacacgctgttgttcaccgcccgaaagctgaatagggaagttcttcgctttgtccagtagcccgactttatccagcgccgccgacacccggcgacgaatatcgtcaccgctggcaccggcgataatcagcgggatcgccacgttatcgtagacagtacggtccatcagtagatggtgatcctggaaaatcatgccaatctggcggcgcagaaacggaacttcacggtttttcagacgcgtgatgtcatggccgctaaaccagattttcccggcgctgggccgctcaatcccacagatcagcttcaggagggtacttttccctgcgccggaatgaccggtcagaaacgccatctcacccggctgcatatggaacgtaacgccctgcagcgcctgtctcccaccgagataagccttgctgacatgttcaaagcgaatcattgttaatcctctcgggcaaaaagtgcctctataaagtcgtccgccttaaacggacgcaaatcctcaatacgttcgccgacaccaatgtagcggatagggataccaaactggtcagccaccgagaaaattaccccgcctttcgccgtgccgtccagtttcgttagcgtgatgccggttaagccaacggcttcatggaacagtttggcctggcttaccgcgttctgcccggtgctggcatcaatagtcagcataacttcatgcggcgcttcaacgtcgagtttcttcatcacgcggacgattttcttcaactcttccatcaggtgcgatttgttctgcaggcgtccggctgtatcggcaatcaggacgtcgatattacgcgctttagctgcctgaatggcgtcgaagataacagaggcggaatccgccccggtatgctgggcaatcaccggaatattgttgcgctgaccccagacctgaagctgttcaaccgcagctgcacggaaagtatcacccgccgccagcatcaccgatttaccctgctgctcaaactgacgcgccagcttaccaatcgtcgtggttttacccacaccgttgacgcccaccatcaggatcacaaacggcgctttgccttcaacattcagcggctcatcgactttcgccagaatctcgcccatctcttctttcagcaggccatagagcgcctcggcgtcacgaagctgcttgcgggatgcgccttccgtcagattggtgataattttacgtgtggtttccacacccacatcggcgatcaaaagctgctcttccagctcctcaaacagatcatcgtcgatttttttaccgcggaacaggctgataaatccggaaccgagattttctttggtttttaacaggctgcgtttcaggcgcgcgaaaaaaccttctttggtcggtttttcctgctcctgagcgatttcttccaccggctgctcttcttctgccggaggaaccaccatcaccgcctcttctgccgcttcggcagccagcgccgtttccagctcttcgtcggtaatttcttctttagccgcttcttcttccgccgcttcgacaatctctacggtttccgcttcagcctgccactcttctggcgaaaccgcttcggcgttgacgtcttccggcaacggcagctcttcacgttcgatagccactggctccggcgtttcttctacgaccggttccggctgtgcaacgacttccgcttcaggctgcgctttttcactttcagcaacctgttcagtgacttccacaacgtcggcagcaaaagtttccgcctcggcttcagtatgcgcttgcggctgctcttcaacggcttgttcagaggccttcacaggctcttgcgcctgaacgatttcttctacaaccggttgttcattctgaacttctgtctctttttccggggtctgctctttttgaccaaagcccagccaggaaaaaaagccacgttttttttctttcgccatttgcgactacactcctcgctgttgcttcatggcacagcgttaacgctatgtacatagcagctaaaaaaatgatgaaatagtctatcacttaacttaattcacatcaccgcctgcaagtatgtgttatctggcggattgagcaatttatcatgaaaaaaccgaatcattccggcagcggccaaatccgcattattggcgggcagtggcgaggccgtaaactcccggttcctgatagcccaggtctgcgccccaccaccgaccgcgtacgcgaaacgttgtttaactggctggctccggtcattgttgacgcccaatgtctggattgcttcgccgggagcggcgcgctggggctggaagcgttatcgcgctacgctgcgggggcaacgttgattgagatggatcgcgcggtttctcagcagttaattaagaatctggcgacactaaaagcaggcaatgcacgcgtggtgaacagcaacgcgatgtcattcctggcgcaaaaaggtacaccgcataatatcgtgtttgtcgatccaccgttccgccgtggcttgttagaagagacgataaatttactggaagataacggctggctggctgacgaagccctgatttatgtcgaaagcgaagtcgaaaacggtctgcccactgttccagcaaactggtcattacatcgggaaaaagtggcgggtcaggtggcttatcggctgtatcaacgcgaagcacaaggagaaagtgatgctgattaatattggtcgtttgttaatgctctgcgtttggggatttttaatcctcaacctggtgcatcccttcccacgcccgctgaatatcttcgttaacgtggcgctgatttttaccgtgctgatgcatggtatgcagctggcgctattgaaatccactttaccgaaagatggcccgcagatgaccaccgccgaaaaggtacggattttccttttcggcgtgtttgaactgctggcctggcagaagaaatttaaagttaaaaaataaccttattgttcgcctacaaagctgacaaagcgcgttcctttatagctcagcgtacctttatcgcccactgtcagggcgtggtactgctgggcgtcgaggcgaaacgtctgctccattcctccgctttgcggtttgaagcttgcctcatagcgtatactggtgcctgccggagtcacttcctgctggcgcgaacggcgatcgttaatcggtttttcccgcttgttgctcaccaccaccagcttttgctggagcggagccatatcattatcagctttttcccgtcgctgttgcataaaacgaaacgatgcggcgacgacaattaagccaatgataacaataaagaaaagaggtggtttgctcatctttatccctcatcggaaaatgcggaaataagcataccctgccagttatggtgttgtcatccgtccaccctcgccactaaactggaagcaagaccgtaggcattccgcttacgaaaaaataacgaattcaaggaactaagatgctttggtcgtttatcgctgtctgtctttccgcatggctatctgtggatgcatcgtatcgtgggccaacctggcaacgctgggtgtttaaaccgttaacccttcttctcctgctgttactggcctggcaagcgccgatgttcgacgccattagctatctggtgctggcagggctgtgcgcctcactgctgggcgatgcgctaaccctgttgccacgtcaacgtctgatgtacgccatcggcgcgtttttcctctcgcacctgctgtacaccatctatttcgccagtcagatgacgctctctttcttctggcctctaccactggtgctgctggttctgggtgcgctgttactggcgattatctggacgcgcctggaagagtaccgttggcctatctgcacgtttatcggcatgacgctggtgatggtgtggctggcaggtgaactgtggttcttccgtccgaccgctccggcgctctctgcgtttgttggcgcttcgttgctgtttatcagtaactttgtctggctggggagccactatcgccgacgcttccgtgcggataacgcgattgctgcggcctgctactttgccggtcacttcctgatcgtccgctcgctgtatctctgataaaacttgactctggagtcgactccagagtgtatccttcggttaatgagaaaaaacttaaccggaggatgccatgtcgactcctgacaatcacggcaagaaagcccctcaatttgctgcgttcaaaccgctaaccacggtacagaacgccaacgactgttgctgcgacggcgcatgttccagcacgccaactctctctgaaaacgtctccggcacccgctatagctggaaagtcagcggcatggactgcgccgcctgtgcgcgcaaggtagaaaatgccgtgcgccagcttgcaggcgtgaatcaggtgcaggtgttgttcgccaccgaaaaactggtggtcgatgccgacaatgacattcgtgcacaagttgaatctgcgctgcaaaaagcaggctattccctgcgcgatgaacaggccgccgaagaaccgcaagcatcacgcctgaaagagaatctgccgctgattacgctaatcgtgatgatggcaatcagctggggtctggagcagttcaatcatccgttcgggcaactggcgtttatcgcgaccacgctggttgggctgtacccgattgctcgtcaggcattacggttgatcaaatccggcagctacttcgccattgaaaccttaatgagcgtagccgctattggtgcactgtttattggcgcaacggctgaagctgcgatggtgttgctgctgtttttgattggtgaacgactggaaggctgggccgccagccgcgcgcgtcagggcgttagcgcgttaatggcgctgaaaccagaaaccgccacgcgcctgcgtaagggtgagcgggaagaggtggcgattaacagcctgcgccctggcgatgtgattgaagtcgccgcaggtgggcgtttgcctgccgacggtaaactgctctcaccgtttgccagttttgatgaaagcgccctgaccggcgaatccattccggtggagcgcgcaacgggcgataaagtccctgctggtgccaccagcgtagaccgtctggtgacgttggaagtgctgtcagaaccgggagccagcgccattgaccggattctgaaactgatcgaagaagccgaagagcgtcgcgctcccattgagcggtttatcgaccgtttcagccgtatctatacgcccgcgattatggccgtcgctctgctggtgacgctggtgccaccgctgctgtttgccgccagctggcaggagtggatttataaagggctgacgctgctgctgattggctgcccgtgtgcgttagttatctcaacgcctgcggcgattacctccgggctggcggcggcagcgcgtcgtggggcgttgattaaaggcggagcggcgctggaacagctgggtcgtgttactcaggtggcgtttgataaaaccggtacgctgaccgtcggtaaaccgcgcgttaccgcgattcatccggcaacgggtattagtgaatctgaactgctgacactggcggcggcggtcgagcaaggcgcgacgcatccactggcgcaagccatcgtacgcgaagcacaggttgctgaactcgccattcccaccgccgaatcacagcgggcgctggtcgggtctggcattgaagcgcaggttaacggtgagcgcgtattgatttgcgctgccgggaaacatcccgctgatgcatttactggtttaattaacgaactggaaagcgccgggcaaacggtagtgctggtagtacgtaacgatgacgtgcttggtgtcattgcgttacaggataccctgcgcgccgatgctgcaactgccatcagtgaactgaacgcgctgggcgtcaaaggggtgatcctcaccggcgataatccacgcgcagcggcggcaattgccggggagctggggctggagtttaaagcgggcctgttgccggaagataaagtcaaagcggtgaccgagctgaatcaacatgcgccgctggcgatggtcggtgacggtattaacgacgcgccagcgatgaaagctgccgccatcgggattgcaatgggtagcggcacagacgtggcgctggaaaccgccgacgcagcattaacccataaccacctgcgcggcctggtgcaaatgattgaactggcacgcgccactcacgccaatatccgccagaacatcactattgcgctggggctgaaagggatcttcctcgtcaccacgctgttagggatgaccgggttgtggctggcagtgctggcagatacgggggcgacggtgctggtgacagcgaatgcgttaagattgttgcgcaggagataaggcaaaccgatcgcaacattgagcgcgatcggtcccctcgcccctctggggagagggttagggtgaggggaaaaggcggcatcgaagccaatcagcccctatcaaccgcctttacgaatcaaataacgataaggcagtccatccgtctctttagcaaccagttcgtgttccataaaggtacaaaacccaggaatatcgcgggtagtggccggatcgtcggcgataatcagcaacgtttcgccaggctgcatattgcgcacggttttgcgcaccatcatcaccggttccgggcagcgcaggccaagcgcgtcgagtgtgtggtcagggctggaaaagagatcggtcattttcttctcatcacttaaaaaaacggcgctagtttacgccctgtgagtccgtaagcaaactaggttaacgattgcgtgaaaattaaccattgcattgtcaacgtaaagcagtatcatgcggcggctcgaaaaaagggtaagcacgttattatgttaaggtaacagacgtgtcgtacgtattgggttccctcaccccaatggttaatcaaaaaggtacaatatgaacgttttctcgcaaactcaacgctataaggcgttgttctggttatcgttatttcatctgctggtgatcacctccagtaactatctggttcagcttcccgtctccattttgggtttccataccacctggggcgcgtttagctttccgtttatttttcttgctaccgacctgaccgtgcgtatttttggcgcaccgctggcccgacgcattatcttcgcggtaatgatccctgcgttattaatctcctacgtcatctcgtcgctattctatatgggttcctggcagggattcggcgcactcgcccacttcaacctgtttgtcgcccgtatcgccaccgccagtttcatggcctacgcgctggggcaaatcctcgacgtgcacgtttttaaccgcctgcgtcagagtcgccgctggtggctggcaccgacagcgtccacactgttcggtaacgtcagcgacacgctggcctttttcttcattgccttctggcgtagcccggatgcctttatggctgaacactggatggaaatcgcgctggtcgattactgtttcaaagtgttaatcagtatcgttttcttcctgccaatgtatggcgtattactcaatatgctgttgaaaagactggcagataaatccgaaatcaacgctttgcaggcgagttaaaggttcgttatcagagttgtgataagatggatgaatgagccgttatggccgtttatcgaaaggaagaagtcaatgcgcaatctggttaaatatgtcggaattggcctgctggttatggggcttgcggcctgtgatgataaagacactaacgctacggcgcagggttcggtcgcggaaagtaacgctaccgggaatcccgtcaacctgcttgatggcaagttaagtttctcgctgccagcggatatgaccgaccagagcggtaagctgggaacgcaggccaataacatgcatgtctggtccgacgccaccgggcagaaagcagtcatcgtcatcatgggcgatgatccgaaagaagatctggcggtgctggcgaagcgtctggaagatcagcaacgtagccgcgatccgcagctgcaagtggtaaccaataaagccattgagctgaaaggtcacaaaatgcagcagttagacagtattatctccgcgaaaggccagacggcgtactcttccgttattctgggtaacgtgggtaatcaactgctgaccatgcaaattacgctgcccgctgacgatcagcaaaaagcgcagaccaccgcagaaaacatcattaatacgctggttattcagtaagttttaagatgatgaggcggcctcagggacgtgttccggaggccgtttttttaatcgccacgtcagtaataacgcgattgcgaccagtcccgccgccgccagataaatcaccggtacgcccgcccagctcatcaccagcccagccagtggtccagtcacgccaagcgataaatccataaatacggtgtaagttgccagcgccgccccctgattttgctgcggaaccgcttttaccgccactacacccaatgccgggaacaccagcgaaaacccggcccccgccagtaagacgccgattttcgccatccacggcatagtcgccacgccaaccagtagcaggccgattatctcaacgctaaagcaaatcatcgctacgtttaagccaccgatacggttaatgccgttagggaataacaaacgcgtaccgacaaacgcacagctaaacagcgtcagcgcgaaagccgcaccgtcccaacctttagcgtcataaaacagcgtgataaaggtggcgatgacgccaaatccggcggaagccagtgccagcgccataccgtacagccagacgcgcccaagcaccgcgcgaaacggcagcggtttgcctttactggcttttaccgtcggacgcgggatcgccaacaaaatggccaccagcgccacgcccataatgattaacgctaacgcctgcaagccgccccagtgataaaacacgacgcctaacggcgcacccatcgccatcgccccgtaagtgacaatgccgttccacgaaatcacccgcccgatatgcagcgagccaaccacgccaacgccccatagggtcgatcccgttccggcaaaactttgcccaatcccaaggatgacgcgccccaggcaaagtaataacaggctgatgacaggcagactggcggttaatcctgccgtcagataccccagaccgctcaaaaagcagccgcataaaccgaagacgacaatctttttgggtcccagcgaatcggcgtaacgtccggcatgagggcggctcagcaaggtggcgaaatattgcaggctgataaccaatcctgcccagaaggcgctaaagcccatcacatcatggacatagcccggtaatacagcgagcggcaacccgatggtgaggtagctggcgaagttaaacatgactatagagacaatgcgcaaattcaggcgcaatccgtttagcgcgggttcggctacgggttcgggcatgaggatcaccacatttttacaacagtgtttcatttttaccacgtgctgacgtgaaaatcagcagtaagaatcagaatattgctggcgtgactcccgctacacttaatacaaaaagtcacaaggaagccccaatggaaacccctcaacccgataaaacgggcatgcacattctgctcaagctggcctcgctggtagtgatcctcgcgggcattcacgcagcggcagatatcattgtgcagctgttactggcgctgttttttgccatcgtcctcaacccgctcgtcacctggtttattcgtcggggagtacaacgccccgttgccattacgattgtagtggtggtgatgctgatcgcactaaccgcgctggtcggcgtactggcggcatcgtttaacgaatttatctctatgctgccgaagtttaataaggagctgacgcgcaaactttttaaattgcaggagatgttgccttttcttaatttgcatatgtcgccggagcgaatgctgcagcggatggactcggaaaaagtggttaccttcaccacagcgctaatgaccgggctttccggggcaatggcgagcgtgcttttgctggtgatgaccgtagtttttatgctgtttgaagtgcgccacgtcccttacaaaatgcgttttgcgctgaataatccacagattcacatcgcgggattacaccgcgcacttaaaggcgtttcgcactatcttgcattgaagacgctactcagtttatggacaggtgtcatcgtctggctggggctggagctgatgggggtgcagtttgcgctgatgtgggcagtactggcgtttttgctcaactacgtgcccaatatcggcgcggtaatttccgccgtaccgccaatgattcaggtgctgctgtttaatggtgtttacgaatgtattctggtcggcgcattgtttttagtggtccatatggtcatcggcaatattttagaaccacggatgatgggccatcgcctggggatgtccaccatggtggtatttctttcattgttaatttggggatggctgctcggcccggtagggatgctactttcggtgccattaaccagcgtgtgtaaaatctggatggaaaccaccaaaggcggtagcaaactggcgattttactggggccgggcagaccgaaaagtcggttaccgggatgaggcgacaagtgatacgatacgcactttcattttccattaaacgttggccctgatatgtatcggatagttctggggaaagtttcgaccttaagcgcagctccactgccaccgggtttacgcgagcaagcaccgcaaggtccacgacgcgaacgctggctggcggggcgtgcattgctttcgcacacgctttccccgctaccggagatcatctatggcgaacaaggcaaacctgcatttgcgccggaaatgccgctatggttcaacttaagccatagcggtgacgatatcgccctgctgttgagtgatgaaggcgaagtcggctgcgatatcgaagtgattcgcccgcgcgccaactggcgctggctggcgaacgccgtattcagcctcggggaacacgctgagatggacgccgtgcatcctgatcagcaactggaaatgttctggcgcatctggacgcgcaaagaagccatcgttaaacagcgtggcggcagcgcctggcaaatcgtcagcgtagacagcacctatcactcctcgctgtcagtcagccattgtcagcttgaaaatttaagccttgcgatctgcacccctactccctttacgctcaccgccgacagtgtgcaatggatcgattcagttaactgatccgcccacccgactgcccatctattgatccagaacaggtaatcagtatgacgaatacttaaaatcgtcatacttatttccgccatctattttaatccattggggttaccatgctctccacactccgccgcactctatttgcgctgctggcttgtgcgtcttttatcgtccatgccgctgcaccagatgaaatcaccaccgcctggccggtgaatgtcgggccactaaacccgcacctttacacgcctaaccagatgttcgcccagagcatggtttatgaaccattggtgaaatatcaggcagacggttcggtgatcccgtggctggcaaaaagctggactcattcagaagatggtaaaacctggaccttcaccctgcgtgatgacgtgaaattctccaacggtgaaccgttcgatgccgaggcggcggcagaaaacttccgcgcagtgctcgataaccgtcaacgtcacgcctggctggagctggcaaaccagattgttgatgttaaagcactcagtaaaacagagctgcaaattaccctgaaaagcgcctactatcctttcctgcaagaactggccctgccccgtcctttccgttttatcgctccctcgcagtttaaaaaccatgaaaccatgaacggaattaaagcgccgattggcaccggaccgtggattttgcaggaatcgaaactgaatcagtacgatgtcttcgtccgtaacgaaaactactggggcgaaaagccagcgattaaaaagatcacctttaacgtcatcccggacccgactacccgcgcggtggcgtttgaaactggcgatatcgacctgctgtacggaaacgaagggttattaccgctcgataccttcgcccgctttagccagaatccggcttaccacacccaactgtcacagccgatcgaaaccgtgatgctggcgctcaataccgccaaagcccccaccaacgagctggcagtacgtgaagctcttaattacgcggtaaacaaaaaatcgctgattgataacgcgttgtatggcacccagcaggtcgccgacaccctgtttgccccttctgtgccctacgccaacctcggcctgaaaccgagccagtacgatccgcaaaaagcgaaagcgttgctggaaaaagccggttggacgctgcctgcgggcaaagacatccgcgagaaaaatggtcagccgctgcgcattgaactttcgttcatcggcaccgatgcgttaagcaaatcgatggcggaaatcattcaggctgatatgcgccagattggcgcagatgtctcgctgattggcgaagaagagagcagtatctatgctcgtcagcgcgacggtcgttttggcatgattttccaccgcacctggggcgcgccatatgatccacacgccttcctcagttcaatgcgcgtaccgtcacacgctgacttccaggcacagcaaggattagccgacaaaccgctgattgataaagagatcggcgaagtgctggcgacccatgacgaaacgcaacgtcaggcgctgtatcgcgacattctgacccgtctgcatgacgaggcggtttatctgcctatcagttacatctcaatgatggtggtatcaaaaccggagctgggtaacatcccctacgcgccgatcgccaccgaaattccgttcgaacagattaaaccggtgaaaccttaatgttgcgttacgtattacgccgctttctgctgctgatcccgatggtgctcgccgcctcggtgatcatttttctgatgctgcgcctcggtaccggcgacccggcgctcgattatttgcgtctgtctaacctgccgccgacgccggagatgctggcctctacccgcaccatgctgggactggatcagccgctgtacgtccagtacggcacctggttgtggaaggcgctgcatcttgactttggtatctcattcgccagccaacgcccggtactggacgatatgctgaacttcctgcccgccacgctggaacttgcaggtgcggcgctggtattaattctgctcacttccgtaccgctcggtatctgggcggcgcgccatcgcgaccgtctgccggatttcgccgtacgtttcatcgcgtttcttggcgtgtcgatgcctaacttctggctggcgtttttactggtgatggcgttttcggtgtatctgcaatggctacccgcgatgggttacggcggctggcagcacatcattttgcctgcggtttccattgcctttatgtcgctggcgattaacgcgcgtttactgcgcgccagtatgctggacgtcgccggtcagcgtcacgtcacctgggcgcgtctgcgcggcctgaacgacaaacagaccgaacgtcgccacatcctgcgcaatgcctcgctgccgatgatcaccgccgtggggatgcatatcggcgaactgattggcgggacgatgattatcgaaaacatctttgcctggccgggcgtcgggcgctatgcggtgtcggcgatttttaaccgtgactatccggtgatccagtgctttacgctgatgatggtggtggtttttgtggtctgtaatttgattgtcgatttgctcaacgccgcgctggacccgcgcattcgtcgtcatgaaggagcgcacgcgtgaactttttcctctcttcccgctggtcggtacgcctggcgctgatcattatcgccctgctggcgctgattgcgctcaccagccagtggtggctgccgtatgacccacaggcgattgatttgccgtcgcgcctgctttcgccggatgcgcagcactggctgggcaccgatcacttaggtcgcgatattttctcgcggctgatggcagcgacccgcgtgtcgctcggttcggtaatggcctgcctgctgctggtgctgacattagggctggttattggcggcagcgccgggttgattggcgggcgcgttgatcaggccaccatgcgcgtcgccgatatgtttatgaccttcccgacctcgattctgtcgttctttatggttggcgtgctcggcaccgggctgaccaacgtaattatcgccatcgccctgtcgcactgggcgtggtatgcacgcatggtgcgcagcctggtgatttcactacgccaacgcgagtttgtgctggcgtcacggctttccggtgcgggccatgtgcgggtgtttgtcgatcatctggcaggcgcggtgatcccttcgctgctggtgctggcaacgctggatatcggccatatgatgctgcacgtcgcggggatgtctttccttggcctcggtgtgaccgcgccgaccgccgaatggggcgtgatgattaacgacgcgcgccagtatatctggacccagccgctgcaaatgttctggccggggctggcgctgtttatcagcgtgatggcctttaacctggtgggtgacgcactgcgcgatcatctggaccctcatctggtgacggagcacgcacactaatgccgcaacagattgaactacgtaatatcgcgctacaggccgcgcagccgctggtacacggtgtatcgttaaccctgcaacgcgggcgcgtgctggcgttagtcggcggtagcggcagcgggaaatcattaacctgcgccgcaacgctgggcattttgcccgctggcgttcgccagacggcgggggaaattttagccgatggcaaaccggtttcgccttgcgccctgcgcggcatcaaaattgccaccatcatgcagaacccgcgcagcgcctttaatccactgcacaccatgcacacccacgcgcgggaaacctgcctggcgttagggaaacccgccgatgacgctacgcttaccgctgccatagaagcggtggggctggaaaacgccgcgcgcgtgctgaagctgtacccgttcgagatgagcggcggcatgttgcagcgcatgatgattgcgatggcggtgctgtgtgaatcaccgtttatcatcgccgatgaaccgaccaccgaccttgacgtggtagcacaggcgcgcatcctcgatctgctggaaagcattatgcaaaaacaagcgccgggaatgctgctggtgacccatgatatgggcgttgtggcgcgtctggcggatgacgtggcggtgatgtctgacggtaagattgtcgaacagggcgatgtagaaacgctgtttaacgcccccaaacatacagtgacgcgcagcctggtttccgctcatctcgccctctacggtatggagctggcatcatgactttacttaacatctccggcctttcccatcactatgcgcacggtggatttaacggaaaacatcaacatcaggcggtgctgaataacgtttccctgaccctgaaaagcggcgaaaccgtcgccctgctggggcgcagcggctgcgggaaaagtaccctcgcgcggttgctggtgggtttagaatcgcccgcgcaggggaatattagctggcgtggcgaaccgctggcgaaactcaatcgcgcccagcgtaaagcgttccgccgcgatattcagatggtatttcaggactccatcagcgccgtgaatccgcgcaaaaccgtgcgcgagatcctgcgtgaaccgatgcgccacctgctatcactgaaaaaatccgaacaactggcgcgcgccagcgaaatgctgaaggcggtcgatctcgatgacagcgttctcgacaaacgcccaccgcagttaagcggcggccagctccagcgcgtctgcctggctcgcgcgctggcggtcgaaccgaaactactgattctggatgaagccgtttctaaccttgatctcgtgttacaggcgggtgtcattcgcctgctgaaaaagctacaacaacagtttggcaccgcctgcctgttcatcacccacgacttacgcctggtagaacgcttttgccagcgggtaatggttatggacaacggacaaatcgtcgaaacccaggtggtgggagagaaattaaccttttcctctgacgccggacgtgtgctacaaaacgcggtattacccgcattccccgtgcgccgtcgcaccacagaaaaggtttaacgcaaatgcaacgagtcaccatcacgcttgatgacgatttactggagacgctggacagcctgagccagcgtcgtggttataacaaccgttccgaagctatccgcgacattctgcgtagcgccctggcgcaagaggccacccagcagcacggcacgcaaggtttcgcggtgctgtcgtatgtgtatgaacacgaaaaacgcgacttagccagccgcattgtctccacccagcatcatcaccacgacctctccgtcgccacgctgcatgtgcacatcaaccacgacgactgtctggaaatcgccgtgttgaaaggtgacatgggtgacgtgcagcattttgccgatgacgttatcgcccagcgcggcgtgcggcacgggcatttgcagtgcttgccgaaggaagattgagtctattattgggtcctttggtgaacgatcaacaaagggccactagcacacctgattcctctctaaataccctatccgaaccttctcttttgtaacgttctaaatatattcctaaaaatcttcaattcattgtgaccacaagtttttcttcgctttttcgtatgaagatactgtcattaaaataatagaaaaggattttacgatgagcggaaaaccggcggcgcgtcagggtgacatgacgcagtatggcggtagcattgttcagggttcagccggggtacgtattggtgcccccaccggcgtggcctgttcggtgtgccccggcggagtgacgtccggccatccggtcaatcccctgctcggtgcaaaggtccttcccggtgaaaccgacatcgccctgcccggcccgctgccgttcatcctctcccgcacctacagcagttaccggacaaaaacgcccgcgccggtggggagcctcggccccggctggaaaatgcctgcggatatccgcttacagctgcgcgataacacactgatactcagtgataacggcggcagaagcctgtattttgagcacctgtttcccggtgaggacggttacagccgcagcgagtcactgtggctggtgcgcggcggcgtggcgaaactggatgaaggtcaccggctggccgcactctggcaggcgctgccggaagaactccgcttaagtccgcatcgttatctggcgacaaacagtccgcaggggccgtggtggctgctcggttggtgtgagcgggtgccggaagcggatgaggtgctgcctgcgccgctgccgccgtaccgggtactgaccgggctggtggaccgcttcgggcgcacacagacgttccaccgcgaagccgccggtgaattcagcggcgaaatcaccggcgtgacggatggtgcctggcgtcacttccggctggtactgaccacgcaggcgcagcgggcagaagaagcccggcagcaggccatttccggcgggacggaaccgtccgcttttcctgataccctgccgggttacaccgaatatggccgggacaacggcatccgtctgtctgccgtgtggctgacgcacgacccggaatacccggagaatttacctgccgcgccgctggtgcgctatggctggacgccacgcggcgaactggcggtggtgtatgaccgtagtggcaaacaggtgcgcagctttacttacgatgataaataccggggccggatggtggcgcaccgtcacacgggccggccggaaatccgttaccgttacgacagcgacgggcgggtgacagaacagctaaacccggcaggcttaagctacacgtatcagtatgagaaagaccgcatcaccatcaccgacagcctggaccgccgtgaagtgctgcacacgcagggcgaagccgggctgaagcgggtggtgaaaaaggaacacgcggacggcagcgtcacgcagagtcagtttgacgccgtgggcaggctcagggcacagacggatgccgcaggcaggacaacagagtacagcccggatgtggtgacgggcctcatcacgcgcataaccacgccggatggcagggcatcggcgttttactataaccaccacaaccagttaacgtcagccaccgggcctgacgggctggaattgcgccgggaatatgatgaattgggccgtctgattcaggaaactgcccctgacggcgatatcacccgctaccgttatgataatccacacagtgacttaccctgcgcaacggaagatgccaccggcagccggaaaaccatgacgtggagccgttacggtcagttgctgagcttcaccgactgttccggttatgtaacccgttatgaccatgaccgcttcgggcagatgacggcggtgcaccgcgaggaagggctgagtcagtaccgcgcatacgacagccgtggacagttaattgccgtgaaagacacgcagggccatgaaacgcggtatgaatacaacatcgccggtgacctgaccgccgtcattgccccggacggcagcagaaacgggacacagtacgatgcgtggggaaaggccgtccgtaccacgcagggcgggctgacgcgcagtatggaatacgatgctgccggacgggtcatccgcctgaccagtgaaaacggcagccacaccaccttccgttacgatgtacttgaccggctgatacaggaaaccggctttgacggccgcacacagcgttatcaccacgacctgaccggcaaacttatccgcagcgaggatgagggtctggtcacccactggcactatgacgaagcagaccgcctcacgcaccgcaccgtgaagggtgaaaccgcagagcggtggcagtatgacgaacgtggctggctgacagacatcagccatatcagcgaagggcaccgggtggcggtgcattacaggtatgatgagaaaggccggctgaccggtgagcgtcagacggtgcatcacccgcagacggaagcactgctctggcagcatgagaccagacatgcgtacaacgcgcaggggctggcgaaccgctgtataccggacagcctgcccgccgtggaatggctgacctacggcagcggttacctggcaggcatgaaactcggcgacacaccgctggtggagtacacccgcgaccgcctgcaccgggaaacgctgcgcagcttcggccgttatgaactcaccaccgcttatacccctgccgggcagttacagagccagcacctgaacagcctgctgtctgaccgcgattacacctggaacgacaacggcgaactcatccgcatcagcagcccgcgccagacccggagttacagctacagcaccaccggcaggctgaccggcgttcacaccaccgcagcgaatctggatatccgcatcccgtatgccacagacccggcaggtaaccgcctgcccgacccggagctgcacccggacagcaccctcagcatgtggccggataaccgtatcgcccgtgacgcgcactatctttaccggtatgaccgtcacggcaggctgacagagaaaaccgacctcatcccggaaggggttatccgcacggatgatgagcggactcaccggtaccattacgacagtcagcaccggctggtgcactacacgcggacacaatatgaagagccgctggtcgaaagtcgctatctttacgacccgctgggccgcagggtggcaaaacgggtgtggcggcgtgaacgggacctgacgggctggatgtcgctgtcacggaaaccgcaagtgacctggtacggctgggacggcgaccggctgaccacgatacagaacgacaggagccgcatccagacgatttatcagccggggagcttcacgccactcatcagggtcgaaactgccaccggtgagctggcgaaaacgcagcgccgcagcctggcggatgcccttcagcagtccggcggcgaagacggtggcagtgtggtgttcccgccggtgctggtgcagatgctcgaccggctggaaagtgaaatcctggctgaccgggtgagtgaggaaagccgccgctggctggcatcgtgcggcctgaccgtggagcagatgcaaaaccagatggacccggtgtacacgccggcgcgaaaaatccacctgtaccactgcgaccatcgcggcctgccgctggcgctcatcagcacggaaggggcaacagcgtggtgcgcagaatatgatgaatggggcaacctgctgaatgaagagaacccgcatcagctgcagcagcttatccggctgccggggcagcagtatgatgaggagtccggcctgtattacaaccgccaccgctattatgacccgctgcaggggcgatatatcactcaggatccgattggactgaaggggggatggaacctgtatggatatcaattgaatccgatatcagacatcgaccccctgggtttatctatgtgggaggatgcaaaatcgggggcatgtactaatggtctttgcggcacactatccgctatgataggtccagataaatttgattctatagatagcaccgcatatgacgccttaaataaaataaatagccaatctatttgcgaagataaagagttcgctggtttaatatgtaaggataatagtggcagatatttctcaacagcacctaaccgaggagaaagaaaaggatcatatccattcaatagcccttgccctaatggtactgagaaagtatcagcttatcatactcatggtgcagatagtcatggagaatattgggacgaaatattttcaggtaaagatgagaaaatagttaaaagtaaagataacaatatcaagtcattttatttaggtacgcccagtggtaattttaaagcaatagataaccacgggaaggaaataacaaacagaaaaggattacctaatgtctgcagagttcatggtaatatgtaaaaaaatattgtttaggaactgtgtcattgtatctttgtttgtttttacatacaacacatgggcgcagtgtaataataatattaaaataatgcgcaagtatgaaagtgaaggtaaatataccgttagaaatttggttaaaaataaagctatagcattggaattagctgagatatatgttaagaatcgttatggacaggatgccgcagaagaagaaaaaccatacgaaatcactgagttaacaacaagttgggttgttgaaggtaccattcactcagaccaaattgctggtggggtttttattatagaaataggcaaaaatgatgggagaattctgaattttggccacggaaaataagtatgtaaggataatcaaacatcgtgtgcgctgatggcagagtaggtggaggactccagacagtcaaacgatagaaaaagatagcctttatggaggttcctgcaatgtcaaatacataccagaaaagaaaggcaagtaaagagtatggtttatataataaatgtaagaaactaaatgatgatgaattatttcgcttacttgatgatcgcaattccttgaaaaggatttcatctgccagagtattacagttaagaggggggcaagacgctgttagattggcaattgaattctgcactgacaaaaattatatccgtagagatatcggagcatttatactcgggcaaatataaatttgcaaaaaatgcgaagataatgtttttaatattttgaacaatatggcattgaatgataagagtgcttgcgttcgagctacggcaatcgagtcaacggccagggaaagatcatcaaaagttcactttttgcactaaataattcgcattttatgtttaaaaattgagatattccttattacctgaagctgttttttattgcttatacatgatcaaatactccttacctaattaaggagaacaaaatggaacttaaaaaattgatggaacatatttctattatccccgattacagacaaacctggaaagtggaacataaattatcggatattctactgttgactatttgtgccgttatttctggtgcagaaggttgggaagatatagaggattttggggaaacacatctcgattttttgaagcaatatggtgattttgaaaatggtattcctgttcacgataccattgccagagttgtatcctgtatcagtcctgcaaaatttcacgagtgctttattaactggatgcgtgactgccattcttcagatgataaagacgtcattgcaattgatggaaaaacgctccggcactcttatgacaagagtcgccgcaggggagcgattcatgtcattagtgcgttctcaacaatgcacagtctggtcatcggacagatcaagacggatgagaaatctaatgagattacagctatcccagaacttcttaacatgctggatattaaaggaaaaatcatcacaactgatgcgatgggttgccagaaagatattgcagagaagatacaaaaacagggaggtgattatttattcgcggtaaaaggaacccaggggcggctaaataaagcctttgaggaaaaatttccgctgaaagaattaaataatccagagcatgacagttacgcaatcagtgaaaagagtcacggcagagaagaaatccgtcttcatattgtttgcgatgtccctgatgaacttattgatttcacgtttgaatggaaagggctgaagaaattatgcgtggcagtctcctttcggtccataatagcagaacaaaagaaagagccagaaatgacggtcagatattatatcagttctgctgatttaaccgctgagaaattcgccacagcgatccgaaatcactggcacgtggagaataagctgcactggcgtctggacgtggtaatgaatgaagacgactgcaaaataagaagaggaaatgcagcagaattattttcagggatacggcacattgctattaatattttgacgaatgataaggtattcaaggcagggttaagacgtaagatgcgaaaagcagccatggacagaaactatctggcgtcagtccttgcggggagcgggctttcgtaatcttgccctgaatacaggactgagtatcaaaaagccggttaactgaaactgtccaggttttgggggtcagttcataaacgccttatccggcctaaaaacaactaaaattcaataaattgcaccgatgcgtagtccctataagcttacgcatcgggcaattgtatttacgccattgtcccaatcgtcttcctgaatcgcagcagcgcaatggtgaaaaatgcgccgccaattgccatcagcgtcagaaactgcggccagacgatttcgaatccggcaccccggtagaggatggcctgcgcgaggctaacaaagtgtgtcgtcggcatggtcagcataatgtcctgcaccatctgcggcatactttcgcgcggcgtggaaccaccggaaagcatttgcagcggcagcagcaccagaatcaccagcagccccagttgcggcattgaacgcgctatcgtccccataaaaatgccgattgacgtggtggcaaacagactgagcgccacgcccagcataaacagcgggatcgagccttcaatcggtacgcccagtacacctttcaccatcagcaccagcgataatcccgataccaccagcaccaccagccccatcgaccagatcttcgccatcatgatctcaaacggcgttatcggcatcaccagtaagtgttccaccgtgccgtgttcacgctcgcggatcagcgccgatccggtcaatacaatcgccagcatggtaatgttgttgatgatcgccatcaccccgccaaaccacgcgggatcgaggttcgggttaaagcgcatccgggtttccagcgataccaacggttcgctgttatcacggtagcgcgcgacaaagctgttcacttcaccgttgataatattctggatatacccattgccggtaaatgcctggctcatgcgcgtggcatcgacgttcacctgaatatccggctggcgtccggcgaggacatcacgctgaaaattaggcggaatatttatcgcgaaggtatagcgtccggcgtccagtccggcatccatctcatcggcggtgatcatctccggtggcaaaaaccacggacgatagaagctgttaacgatccggttcgataactgcgattgatccatatcggcaatggcgatcggcgcgaggttcaacgatcctggcgtaacggtcgctgacgaatacaccgacaccgtaaacgagaagacaatcagcgtcagcatcgctttatcaccgagcagactgcgcaactctttgatacccagattaaaaatattgcgtaaatggcgcatcatccctcctgttttttcagcagcaggatacttaagcccatcaccagcgggatggctatcagtaacgggataaaaagttgccacaaatcagtcagatccagcgctttcgagaacgtcccgcgggcgatagtcagaaaatgactggtcgggtaaacctcgccgatccaacgtccaggcccttccagcgaagctaccggatcgatcatcccggaaaactgtgtcgccgggatcaacgtgataatcgccgttccgaaaatggcggcaatctggcttttcataaaggtggagatcagcagccccattccggtggcaatgatgatatacagcagcgccgccagggtgagcgtcaggaaactgcctttatgcggtacgccaaacacaaacaccgacaggccgcagagcaggaaaaagttcagcatccccagcgcgatgtatggcaactgtttaccaagcaaaaattcactacgcgtggtgggggtcacgtaaaggttgataatcgacccaagctctttttcccgcaccacgctaagggcgcttagcattgacgggatcatcatcagcagaagcgggatcaccgccggaacaatcgctggcaggctttttacgtccgggttatagcgatagcgcgtctcaatattcatcagcccgctttggctggcgggtgtcgattgtcggctcgccacatcctgtaaccagctctggtgcatggcctgcacgtaaccttttaccgtttcagcacggctcggcatcgctccgtcgatccagacgccgagttccacaggcgtaccacgcgcgatatcgcgcccgaaattgggcgggatctcaatcgccaccgtgatatcgcccgcacgcatccgacgatcaagctcgtcataactggtgagcggcggctgttcgataaagtaacgggaaccggagaggttgagtgtccacgcctggctactgacggtctggtcgcggtcgagcaccgcaaagcgcaggttttccacatccatactgatgccgtaacccattatcagcatcaggatcaccgttcccatcagcgccagcgtcgaacgtactggatcgcgtcgcagttccagcgcttcgcggcggctgtagctaaacagacggcgcaggctaaatccctgacgcggcgcgtgggtggtgtcgtgtaccacgggcggcgcttcggcttcgttgctctgccctgccgcttcctgcaaataggcgataaatgcctcttccagactggcggctccgcgtttctcaaccagttcctgcggtgtaccgctggcaagcacttttccggcgtgcatcagtgagatgcggtcgcaacgttccgcttcgttcataaagtgggtggagatgaagatagtcactttgtcctggcgcgagagatcgaccatcaactgccagaacatatccctcgccaccggatcgacaccagaagtaggctcatcgaggattaacatctccgggcgatgaatcaccgccaccgccagcgaaagccgctggcgaatgccgagcggcaatgactccggcagaatatcttcaacgtcgttgagcttaaaacgctcgctcatttcagccactcttgcgggaatttccgcttccgggatgtgaaacaaacgggcatgtaactcaaggttttgccgcacggtgagttcgttatagagcgaaaacgcctgcgacatatagcccacccgacggcgggtatcgatatcttttggatcaaccggttgcccgaacagccacgcctcaccttcgctggcgggcagcagtccggtgagcattttcatggtggtggatttaccgcagccgttcgaaccaagaaaaccaaaaatctccccgcgtggaatgcggaaattaacgtgatcaacggcaacgaaggaaccaaaacgcatggtcagatcgcgcgcttcgatggcaatctctgcgttttcaggttgatacggtgggatcactaccgcctgatgcgcctggcgttgcgcttgcggtaacagatttataaatgcttcttccagcgtagcgctttgcgtttgctgccgtagctcttcggcgctgccagttgccagcacttctccggcattcatcgctaccagccagtcgaagcgttcggcctcttccatataggcggtggcgaccagcacgctcatattgctctgccgctggcgaatactgtcgatcagatcccagaactgggagcgggagagcgggtcaacccccgttgttggctcatcaaggatcaacagttccgggtcgtggattaacgcgcagcacagcccaagtttttgcttcatcccgccggagagtttccctgccggacgatcgcgaaacggtgctaacccggtgctggtcagcagctcattgattcgcacttcccgctccgctttgtcgtgaccgaacaggcgagcgaaaaaatcgacgttttcatacaccgacaaggtgtggtagaggtttttgcccagcccctgcggcatccaggcgatgcgcgggcagacgtcgcggcgatgcttcgggtcgcgcatatcgccgcccagcaccatcacattgccctgttcaatgacgcgggcaccggaaatcaacgacaacaagctcgacttcccgacgccgtccgggccaatcagcccgaccatacagcgggccggaatatcgagagtgatattgttcagcgcaacggtttttccataatgctggctcacgcccgccagttgcgcgacaggcgggacgggaaccagttccagatgcgtcattgcggcaacctcaccacgaggtcgtcaggccacggaagttcttcattcacccgcacccacgctacgcccggcaaaccggttttgacatattccagatgctgctggagtaattccggtgggatacgcgctttgacgcggaacatcagtttcagccgttcatcgctggtttcgacggtttttggcgtgaactgggcgacactggcgacaaaactgatggttgcaggaatacgcagatctggcgcggcatcgaggatcagccgggcttcaccgcccagtttcagcgtgcccgcctgttcggttggcaggaagaaagtcatatagacgtcgctgagatcgaccatattcagcacccgaccgcctgccgccagcacttcgcctggcttggcaacccgatactgcacgcgtccgtcacgcggggctttcagttcgctgtcatcgatatctgcggcaatgcgccgttcagtggcttgtgccgcttcgacgcgggtttgcgcctgaatgatattggtgcgtgccgcttctatagccgctttagaagccgatacctgagctttcgccgattccagcgcagctcgggcgctctcagcggcggcgcgatcgtcatccagctgttgcgcagaaatagcccctcgttgggccagtgaacgggaacgcgtatgacgttttgctacggagtccagttctgcctggcgttgattaaccagcgactgtgcggcacgagtttcgctttgtcgttgctccagcaaagcctgcgcggcagcaacggcgctttgtgcctctttgatttgcgcgatggcttccagtcgctgttcctgcaacacgcgagtatccatcttcgccagcacttcaccttcgcgaacaaacttgccttctttcaccagaatggtgtcgatacgcccggcaattttgctggcaatatccacttccgtcgcttcaatgcgcccattactgacagcaaagccttccggcacacctgccgggcgcaacagccaccacgccacgatagccgccaccgccagtaacccgacaacccaccacgccagatggcgcttactcttatccataatcgacccgccataatccctgtaagcaaacgacgcgtgttacaactgccgccgaacgacgttcagcggattcttccatccgggataagaaggaaacggcaaatacgaccagcgcgcagagcattgagcgccaacggggaaggcttagtgaaaacgggtagtaatgttgtcatcatcagcattcctggccgtaaatgaaacacgcatactcataagtgtgatctataaaactggctgacaaaacggtatccatcctgttggatagcgtttcacgcctgttcagttgcaggaacagagcattcctttttacgttttatcaacagtctcaaccagatagtaacattaatattcatgttgtctatggttcagagctgtaacattgtgcgccttctaatcaaaggcataagtccatttctgtttttttcatgctggtaagacttccagggagtggttatctcaggccctgcaccagggttaatttggcaattatgcatgctgaacattcttccagcatgtttactgtcacgggcgttaagacctaaaactgtccccgtttcgcctatgcgttctcttccaccatttccgttatgtgcaacaacttgatttatacctaacatttgtgaacatgctaatagtgcttcaagtttaggtctgtaatctgtcgaaacagaaaaataacgattaaaggatcgacaagagatagcccggctagttttaaactttttgccattaattatagcatgatgctttttattgataattgccgctaattcgaccggatcgagagcattggtcatttcatcaatagagactgttatcggtcctataatgtaacgttttcgctgatcatcaaaagttatcccatgatgatttgccattattttgtatttggggtcatagaaacatacaggataatcttttatcccagagtaggtatcctcatcgagtggtttcatacgcgtgaagttctgcatatagttaccattgcaattcgtttcatgatttccagctaatacatgaacattttcattgatactcattatgcgttttaacaaatcgatgataaattgatcaccacagatattgctaaatcgatcgccggtttggtcgcccagaaacgtacatggcgtcacagcgtctttattaataactaaataaggctgaagactttctaaaataatgtctcttctgttcaggatactgattattgtattaacattagtgttaagttgctcattaaagttctcccttagcaatacgttgagaacttcatcttctatattaagcaactggctaaggaaattttctccttcagccatgattcccaaatgtcccgttgcgaaaagcgcgaacaaaactgcaccgactgagccatcggtatcaccaaaataggttggtctggtacttgtgggatcaacgggtaaacaattggagaaatagattctgtcagcgaactggggttttatcattgtttcgaatttaatatcagatacattatattgcgatattttccagttccagatgggtttgtacgactcagtaactgcaacatcattagcattatcatttactgtcatattattaagtaaataaacaatactgcaccaattaatatcggtattatcaagagagcaaccgtaatttttgctattaattgtcacaataaactgataattattattcctacgtagaatatgagcacgcatgcccgatagcatactatatttttctgaatgatccgtttgtatggtaaatgaaattttgtcatcttgaatagattgttggaaccgttctatttgccaatcatctattttttccacaacctcaccgagcattgtcctggcaatacttgatatatcatcacctataccatttgcaatatacccaaacagttctttagtgaagttggtaacatgctcttgcaccatatcatttgttgcgattgtcgttgtactgtcgttagtgcctgccacagttccaattttcatattttacctcatattatttaccgcgaggaatacatagttaacattttatcttatgacatacacctcatgttcgatgggaaaataattatattttgcacaaatcattcagcctcaaagcataatatgaaatttcttatctcatagcagagaaagtccctaaagattgtagaggcgtcatcagaacatgcctctacaatcgattaagaaaacctatgaaatactggcaggattaaaaagacataccaccgtattcatggagttttaatgtagttgaaaacaactaagccctgaggaataaattattttattatttttatcacgtgcttccttcagggaatttagccccataataccattatcaaattgttgattatgatctaccccgggcccatgatgcccatatttttgtctaatgtatttgctggggtcttcacctttgagtgtctccccacatatgaagatacgttcacgtgctggtctgaaatcagtagtgttatcaaaataattagcatatacaggtgtgggtttcaaagtattgcttcggattagatggaatagaggatcatccatgtgttctttatgttttttattaaaaatattggctaattcctcaggatcagtaggatttttcatctgattaaatggaacctgcaaagcaccgagacaataacatttttttcttcatctcttattattccgtgatgactggttaaaacttgcctttctgagtcataattacaaacatcgagcgttttaattaagttatacgtatcaccggcagagagtttatgatttgctagtcgtgcagtatagttaccattaaaattgatttcatgatttccagccagaacgacgacatttttattaatacggctatctttattaccctccatatttcgcatagaatttagcaaagtaaggatatatttatcaccaaaaatagtactaaatctatcgcctgtatgatccccaaggaagatacaaggggttatcgcatcgtcctttaaaaaaacatgttgatgcaactcattcaagatcatgtctctcgtatttaataaatcgtagagcactttattatttttatgtttgtatgcagatgaagccatctcttcgtgttttaataattcacataataaactccaacccttttccctgatgcctatatgccctgaaacgagcaatgcataaagtacagcgcctactcttccatctgtatcgccaaaataagccgtgttggcattttgtgggttaatcacaccacactgtttatagaagtctatttttgaaaacacagatttaacatagctatcaaacttttccttagtaaacgtctctttagagacatcccaacgccagtcaggtttgaaattaccactaagaagagtaaagaaatttctcgctatgatagaaagcccatcaactttataaattatatctgatttatctccagaggaattaataaaataataaccgcccttacactcaacagtaacggtaatgggagacgataattttaacacatggttattgtctggtataattgtaaagataaacgtatcagtagtattgtcggcgaatctattatattcttgaatatctatagaaggttcactattataaaaccatactttctccatctggtgactacgatcatttaccttccagtgaccatgttgcaggaaatagatgatatgcaggccaaaatcgttatctatttgcgaatcattatccagtttatcaaattcaactatctttgcacgatgtgttttatcaaccttgccatggtgttgatgactgttaactttatctgaatgcttatcttgatggcttgaagagatgtttctaatctgattgtcaattgctttcataaataacctgtgatatttttgaattgtttgtaacaaaataaatgatacttgtctgaaaaacagatttacgacgatataaaataataatacttatatgttcgctgattttaagcaccgagactatccggtcttttaccaaataatgaagaataatccctccctggaagataattgtaaaaaacaacagcataagaattaatcttaggataaatttttatttatcatggccttttgaacgctgaaaagtagcgctctgcaaagtaaaccccgctatagttatgctatgcatttgtctttaatgatatctcgtcattatattaacaggatgaaattatcattaatgcatatttcaatattagcagggatacctgaggagtttaaagtgaacatatatatcgggtggcttttcaaattaatccctttgattatgggcttaatttgtatcgcgttaggtggctttgtgctggaaagttcagggcaaagcgagtatttcgtcgcgggtcatgtgctgatttctctggcggccatatgcctggcattattcactaccgcatttattatcatttcgcagctcacgcgcggcgttaatacgttttacaatacattgttccccattattggctatgcggggtcaattatcaccatgatatggggttgggcactgttagcaggcaatgatgtgatggcagacgagtttgtcgccggccatgttattttcggcgttggtatgattgccgcctgtgtatcgacggtggcagcgtcatccggtcactttctgctcattcccaaaaatgcagcggggagcaagagcgacggaacaccggtacaggcttattcttcattaatcggtaactgcctcattgccgttcccgttttactcaccctgctcggtttcatttggtctattacgctgttacgtagtgctgacataactccgcattatgtcgcgggtcacgtattgcttgggttaaccgcaatctgtgcctgtctaattggccttgttgccacaattgtccatcaaacacgtaatacgttttcaactaaagaacactggctgtggtgttattgggttatttttctcggctcaatcacggtactgcaggggatatacgtcttagtcagttccgatgcaagcgcccgactggctcccggcattattcttatttgcctcggaatgatctgttacagcatattctcaaaagtctggctactggcactggtatggagacgtacctgttcgttagccaacagaataccgatgattcccgtcttcacctgcctgttttgccttttcctggcatcgtttcttgcggaaatggcgcagaccgacatgggatattttattccttcgcgagttctggtcggtttgggagcggtatgctttacgttgttctcaatcgtttcaatattagaagcgggttctgctaaaaaataattgcaacgtaccggataaaaccagcgttgaccatttgcgtaacgctggtttttcttaggcatcatgaaataacgcagcattaatgcatagtggttaagtataaaaaacagcaaagttactgtttttttcaacctgttcatatttcataaagatctggccactgagtgagttttcaatcacctttccatccaccttatattaagcatggagggtttcagttcacgggctcattagaaaataatcacaagataaccactatcaaaattagctcatttttaatgcgactctaataattttcatctttaggaaataggtcaggacgactttgctgcaatcaaatcctgcgcacaagcccacgcactcgaccacgcccactggaagttatagccccccagccagccggtgacgtccatcacttcgccgatgaagtacagcccaggcactttgcgcgcttccatcgtccgtgaagagagttcgttggtgtccacgccgccgagcgtcacttcggcagtgcgatagccttcagtgccgttgggttgtacgcgccagtcggtcaatgtgctaatcagtgcctgttggtcacgcacgttgagctgttttagcgaaacatccgggatttgcccgagttgctgtaagcgttcaaccaaccgcttcggtagatgaaccgccagtgtgtttttcaggctttgattcggatgtgcgttacgctgctcattcaggaaggtttcgaggtccacatccggtagcagattgatgctgacaaattcccccggttgccagtagcttgaaatctgcaacaccgccggtccagacaagccgcggtgggtgaagagtaagttctcacggaaaacggtgccgttttcagcggtaatcacggaaggcaccgccacgcccgccagcacctgtaactcttcgagcaacggtttatgcagagtgaatggcaccagacccgcgcgggtcggcagcacgttgaggccaaattgttcggcaatcttataaccaaacggcgacgcgcccagccccggcattgacagcccaccagtcgcgatgaccagcttttcgcaaccgacagtcatgccgttcagatcaagcgtgaagcctgtttcatccttcgccacactcagcacttcgctacgcaatctgaaggtcacattgcccttctcgcactcatccaccagcatgtcgacaatctgctgcgcggagtcatcgcagaagagttgccctaacgttttctcgtgccaggcgatgccgtgtttattgaccagatcaatgaaatcccactgggtaaaacgtgcgagtgcagacttacaaaaatgcggattctggctcagataagcgcctggttcgacataaaggttggtaaagttgcagcgcccaccgccagacataaggattttgcgccctggttttttaccattatcgatcagcagaacccggcgtcctgcctgacctgccagcgcagaacagaacatacccgccgcaccagcgcctataataatggcatcaaacctttccacgttgcgctcctcttagaaaaaacgggcgtgaattgtaaagattcctcagtggtcgcaccagcatcaatattactaaaaggaagtatttgcctgaattatataagataattattttttgagtgaaatccatacagggggcaaatcaaaaaaagtctatatttcactttgcccgcgccgcgaaagtcactgataatgcgccgcgttcatgtcctcaaaatggcgtaacgtcctatgctacatttgtttgctggcctggatttgcataccgggctgttattattgcttgcactggcttttgtgctgttctacgaagccatcaatggtttccatgacacagccaacgccgtggcaaccgttatctatacccgcgcgatgcgttctcagctcgccgtggttatggcggcggtattcaactttttgggtgttttgctgggtggtctgagtgttgcctatgccattgtgcatatgctgccgacggatctgctgcttaatatgggatcgtctcatggccttgccatggtgttctctatgttgctggcggcgattatctggaacctgggtacctggtactttggtttacctgcatccagctctcatacgctgattggcgcgatcatcgggattggtttaaccaatgcgttgatgaccgggacgtcagtggtggatgcactcaatatcccgaaagtattaagtattttcggttctctgatcgtttcccctattgtcggcctggtgtttgctggcggtctgattttcttgctgcgtcgctactggagcggcaccaagaaacgcgcccgtatccacctgaccccagcggagcgtgaaaagaaagacggcaagaaaaagccgccgttctggacgcgtattgcgctgatcctttccgctatcggcgtggcgttttcgcacggcgcgaacgatggtcagaaaggcattggtctggttatgttggtattgattggcgtcgcgccagcaggcttcgtggtgaacatgaatgccactggctacgaaatcacccgtacccgtgatgccatcaacaacgtcgaagcttactttgagcagcatcctgcgctgctcaaacaggctaccggtgctgatcagttagtaccggctccggaagctggcgcaacgcaacctgcggagttccactgccatccgtcgaataccattaacgcgctcaaccgcctgaaaggtatgttgaccaccgatgtggaaagctacgacaagctgtcgcttgatcaacgtagccagatgcgccgcattatgctgtgcgtttctgacactatcgacaaagtggtgaagatgcctggcgtgagtgctgacgatcagcgcctgttgaagaaactgaagtccgacatgcttagcaccatcgagtatgcaccggtgtggatcatcatggcggtcgcgctggcgttaggtatcggtacgatgattggctggcgccgtgtggcaacgactatcggtgagaaaatcggtaagaaaggcatgacctacgctcaggggatgtctgcccagatgacggcggcagtgtctatcggcctggcgagttataccgggatgccggtttccactactcacgtactctcctcttctgtcgcggggacgatggtggtagatggtggcggcttacagcgtaaaaccgtgaccagcattctgatggcctgggtgtttacccttccggctgcggtactgctttccggcgggctgtactggctctccttgcagttcctgtaatcgtacgcaccaaaacgagcgggtcagctggcccgcttcagattgtgacatagtgcgctttgttcatgccggatgcggcgtgaacgccttatccggcctacaaaaacatgcaaattcaatagattgcagagattatgtaggcctgataagcgtagcgcatcaggcaattttgcgtttgtaatcagtctcgagcgggtcagtttactggcccgctttttttatgcgttattattgctgaagtgcttaatgccaaatcatcaatgcaatcaggctgaccaccaccagaccacacaatgcgctggtcagaataaactgccgacgcacccgctcacagcggcgaataaattcatcatcgtgatgatcgcgataacgttgggcatagatataccaaacgagacgcacctgtttgttgggttggccatgtgaggtaaaaaagccccctccatcaacatattgatagagcaatggatcgcagttacgcagtaccactaacaacgcgcgtagtgatgagaaatagcgcgccatgttaacaatgcaaacgacacataaagcccaaaataatgcgacggtgcttatcatacctcctccccggcgacctgcccgcggagttccaccccggggctaccgctcccgatacgctgccaatcagttaacaccaggtcctggagaaaccgcttttgtggtgaccaacatacgagcggctctatagatagtgtaggagatcaggttgttttttttccagaaggttaaccactatcaatatattcatgtcgaaaatttgtttatctaacgagtaagcaaggcggattgacggatcatccgggtcgctataaggtaaggatggtcttaacactgaatctttacggctgggttagccccgcgcacgtagttcgcaggacgcgggtgacgtaacggcacaagaaacgctagctggccagtcatcgacaactttatggaaggagtaacactatggcttataaacacattctcatcgcggtcgacctctccccggaaagcaaagttctggtagagaaagcagtctctatggctcgcccctacaatgcgaaagtttctctgatccacgtagatgtaaactactctgacctatacaccgggcttattgatgtgaatctgggtgatatgcagaaacgcatctctgaagagacacatcatgcactgaccgagctttccactaatgcaggctacccaatcactgaaaccctgagcggcagcggcgacctgggccaggttctggtcgatgcaatcaagaaatacgatatggatttggtggtttgtggtcaccaccaggacttctggagcaaactgatgtcttccgcacgtcagctgatcaacaccgttcacgttgatatgctgattgttccgctgcgcgacgaagaagaataatcttccctctacgacgtgttcctgaacgcccgcatatgcgggcgttttgctttttggcgcgccttgttacctgatcagcgtaaacaccttatctggcctacggtctgcgtacgcaatcaaaatccccagccaatacaacatttaacaccatcatattttccatcattagtgtgatcatctggttattttctgttgtaatagtgtattaatctattcaccgcatcaatattaagaatctctgacagatgtaaactttttcgcgcgttatcccttacgcgttcatacttttcaggatggtattggaaggttaataaatatgaatacaacaacacccatggggatgctgcagcaacctcgcccatttttcatgatcttttttgtcgagttatgggagcgattcggctactacggcgtgcagggcgtactggcggttttcttcgttaaacagcttggattctcgcaagagcaggcttttgtcacttttggtgcttttgctgcgctggtctatggcctcatttccattggcggctatgtcggcgaccacctgctggggaccaaacgcaccattgttcttggagcacttgtgctggcgattggctacttcatgaccggcatgtcgctacttaagcctgacctgattttcatcgccctggggactatcgctgtcggtaacggcctgtttaaagctaacccagccagcttgctttcgaagtgctatccgccgaaagatccgcggcttgatggcgcattcaccctgttctatatgtcgatcaacatcggctcgttgatagcgttatcgctggcccctgtgatcgctgatagattcggttattcagtcacctacaacctgtgcggggcggggttaattatcgcattactggtttacatcgcctgtcgtggaatggtgaaagacattggttctgaacccgacttccggccaatgagcttcagcaaactgttgtacgtgttacttggcagcgtggtgatgatcttcgtatgcgcatggctgatgcacaacgtagaagtcgccaatctggtgctgattgttctctccatcgtcgtcaccatcatcttctttcgtcaggcattcaagctggataaaaccgggcgcaataaaatgtttgtcgcctttgtcctgatgctcgaagcggtggtgttttacattctctacgcccagatgccaacatcgctgaacttctttgccatcaacaacgtgcatcatgaaattctcggtttttccatcaacccggtcagcttccaggcgcttaacccgttctgggtggtactcgccagcccaatactggcaggcatttacacgcatctgggtaacaaaggcaaagacctctcgatgccgatgaaatttactctcggcatgtttatgtgctcactgggctttttgacggcggcagctgcgggaatgtggtttgcggatgcacaagggctgacatcgccatggtttatcgtgctggtgtacttattccagagcttaggtgaactgtttattagcgcccttggcctggcgatgattgctgccctggtgccgcagcatttgatgggctttattctcgggatgtggttcctgacgcaggctgccgcgttcttgctgggcggctatgtggcaacatttaccgcggtgccggacaacattaccgatccgcttgagacgttgcccgtctataccaacgtgtttggtaagattggtctggtcacgctgggcgttgcagtagtgatgctgttgatggtgccgtggctgaaacgcatgattgcgacgccggaaagccattaattattcttgcagaaagcagggtagcgttatcgctaccctgttttagttttacactggcgtacctgcatagatatcaaagcgatgccctttagtgactaccgcgtttggcgtggcgacattcgccagcggtggcgcgtagtccgggcgctttaccaccacgcgtttggtcgccagcaagcgtgcaggctccagtaatccatcggcatcaagatccggtcccaccagcgactgaaagacacgcatctcttttttcactagcgcgcttttctgcttatgcgggaacatcgggtcgagataaaccacctgcgggcgcggggtaatatcagtcagcgccgtcaggctggaggcgtgaattaactgcaaccgctcctgcaaccagccgccgatttccgcatccgcataaccacgcgccaggccgtcgtcgagtagcgcggcaaccactggattacgctccagcatccgcacgcggcagccgactgaagccagtacaaaggcatcgcgcccaagtcctgcagtggcatccaccacatccggcaaataatcgcctttaatgcccaccgctttcgccaccgcctcaccgcgaccaccgccgaatttgcgtcggtgcgccatcgctccgccaacaaaatcaacaaagatgccgccaagttttggctcatcacgcttgcgcaattccagatgttccggcgttaacaccagcgccatcaggttgtcttcatcgtgctccagcccccagcgggccgccagaacagataaggcaccgtctccggtgcctgtttcatcaattaagcagattttcactgaatgatcagcccttaatgccgtaatgctccagcatcgcatccagctgcggttcacgaccacggaagcgtttgaacagatccatcggctcttctgaaccgccacggctcagaatgttgtcgaggaacgactgcccggtttcacggttgaaaatgccctcttcctcaaagcgcgagaaagcatctgccgccagtacgtcagcccacaggtagctgtagtaacctgcggcataaccaccggcgaaaatatggctgaaagcgtgcgggaaacggccccaggacggagatggcaccacggcaaccagtttcttgatttctgccagagtttcgaggatttttgccccctgatccgggcggaactcggcatgaaggcggaaatcaaacaggccgaactccagctgacgcagaataaacagcgccgcctggtagttcttcgccgccagcattttatccagcaactctttcggcagcggttcgccggtttcatagtgaccagagataaacgccagcgcctccggctcccagcaccagttttccataaactgactcggcagttcgaccgcatcccacggcacaccgctgataccggaaacaccagcggtttcgatgcgggtcagcatatggtgcaggccgtgaccgaactcgtggaagagggtgatcacttcgtcgtgagtgaacagcgccggtttaccatttaccgggcggttgaagttacaagtcaaatacgcgaccggtttttgcaaagaaccatcagctttacgcatctggcctacgcagtcatccatccacgccccgccgcgcttgttttcacgggcatacagatcgaggtagaagctaccgcgcagttcgttattttcgtcatacagttcgaagaaacgtacatccggatgccagacatcaacatctttacgctctttagcggtgatgccgtaaatacgcttaaccacttcaaacaggccgttaaccgctttgttttccgggaagtacggacgcagctgttcgtcactgatgctgtagaggtgctgtttttgtttttcgctgtagtaagcgatatcccacggctgcaactcatcgacgccaaattcggctttggcaaaggcacgcaattgcgccagctctttttcgccttgtggacgcgcgcgttttgccagatcggttaagaaatccagcacctgctgcgggttttctgccattttagtggcaagggatttaaaggcgtagttttcaaagcccagcagttgcgccagttcgtgacgcagcgcgaggatctcttccatcaccttgctgttatcccatttaccggcgtttgggccttgatcggaggcgcgggtgctgtaagcgcgatacatctcttcacgcagagcctggttgtcgcagtaggtcattaccggcaagtagcttgggatatccagcgtcagcaaataaccttccagctctttcgcttcggcctgggcttttgccgcagccagcgcgctttctggcatccccgccagctccgcttcgtcggtaacgagtttggtccagcccattgtcgcatcgaggacgttgttgctgtactggttgcccagttcagaaagacgggtcgcaatttcgccgtaacgctgctgtttctctttcggcagacctatgccagagagttcaaagtcgcgcagtgcgttatcaaccgctttcttctgcgccgtgttcagcgtggcgtaatgatcgccatcgcgcaggtcgcgatacgctttatacagcccttcatgttgccctacccaggtgctgtattccgacagcagcggcagggtttgttcgtaggcttcacgcagttccgggctatttttcaccgagttcaggtggctgaccggggagaagatacgccccaacacatcgtccacttccgccagcggctggcagagattttcccaggtgtacggtgccccttgcgctactacgcgctccacgttttcgcggcagtcgttcaatgccttagtcacggctggaacgacatgttccgggagaattttagaaaacggaggcaattcaaagggagtcagtaacggattcgtcattcgcgcagtcctggttaaagaggttaaggaagcgctcaacaggcgctttacataatgtgtgtagcatggggttaagtgtagtgaatttcaatgagaaacgttacgctttcgcggcggcggcctcttttcggtatactgtcctgatacgcttttgtgcgccccgaatacgggccgatttttacttaccggaacacctttacccatgctcagttatcgccacagctttcacgctggcaaccacgccgacgtccttaaacataccgttcagagcctgatcatcgagtcgctgaaagagaaagataaaccgtttctctatctcgacacccacgcaggggccgggcgttatcagttaggcagcgaacatgccgagcgtaccggcgaatatctcgaaggcatcgcccgtatctggcagcaggacgatttgcccgcagaactggaggcgtacatcaatgtggtaaaacacttcaaccgtagcggtcagttgcgttactaccccggttcgccgttgattgctcgcctgctactgcgtgaacaggacagcctgcaactgaccgaactgcacccgagcgattacccgttgttgcgttctgaatttcagaaagatagccgtgcgcgtgtcgaaaaagccgacggtttccagcagcttaaggccaaactgccgccggtttcccgccgtggtttaatccttatcgacccgccgtatgaaatgaaaactgactatcaagcggtggtcagcgggatagcagaaggttacaaacgtttcgccactggtatttacgcactgtggtatccggtggtgctgcgtcagcaaattaagcgcatgatccacgatctggaagcgaccggtattcgcaaaattctgcaaattgaactggcggtactgccagacagcgatcgccgtggcatgaccgcttccggcatgattgtgattaacccgccgtggaaactggaacaacagatgaataacgtgctgccgtggctgcacagcaaactggttccggcaggcaccgggcacgccaccgtaagctggatcgtgccggagtaattgcagccattgctggcacctattacgtctcgcgctacaatcgcggtaatcaacgataaggacactttgtcatgactaaacactatgattacatcgccatcggcggcggcagcggcggtatcgcctccatcaaccgcgcggctatgtacggccagaaatgtgcgctgattgaagccaaagagctgggcggcacctgcgtaaatgttggctgtgtgccgaaaaaagtgatgtggcacgcggcgcaaatccgtgaagcgatccatatgtacggcccggattatggttttgataccactatcaataaattcaactgggaaacgttgatcgccagccgtaccgcctatatcgaccgtattcatacttcctatgaaaacgtgctcggtaaaaataacgttgatgtaatcaaaggctttgcccgcttcgttgatgccaaaacgctggaggtaaacggcgaaaccatcacggccgatcatattctgatcgccacaggcggtcgtccgagccacccggatattccgggcgtggaatacggtattgattctgatggcttcttcgcccttcctgctttgccagagcgcgtggcggttgttggcgcgggttacatcgccgttgagctggcgggcgtgattaacggcctcggcgcgaaaacgcatctgtttgtgcgtaaacatgcgccgctgcgcagcttcgacccgatgatttccgaaacgctggtcgaagtgatgaacgccgaaggcccgcagctgcacaccaacgccatcccgaaagcggtagtgaaaaataccgatggtagcctgacgctggagctggaagatggtcgcagtgaaacggtggattgcctgatttgggcgattggtcgcgagcctgccaatgacaacatcaacctggaagccgctggcgttaaaactaacgaaaaaggctatatcgtcgtcgataaatatcaaaacaccaatattgaaggtatttacgcggtgggcgataacacgggtgcagtggagctgacaccggtggcagttgcagcgggtcgccgtctctctgaacgcctgtttaataacaagccggatgagcatctggattacagcaacattccgaccgtggtcttcagccatccgccgattggtactgttggtttaacggaaccgcaggcgcgcgagcagtatggcgacgatcaggtgaaagtgtataaatcctctttcaccgcgatgtataccgccgtcaccactcaccgccagccgtgccgcatgaagctggtgtgcgttggatcggaagagaagattgtcggtattcacggcattggctttggtatggacgaaatgttgcagggcttcgcggtggcgctgaagatgggggcaaccaaaaaagacttcgacaataccgtcgccattcacccaacggcggcagaagagttcgtgacaatgcgttaaatgttaaagggctaagagtagtgtgctcttagcccttaattacgtttccgctatcagttcagaagctgaagcagaaagcggatcagttccagcagcgcaattaacgcccctagaacgatgattgctttatcaatcacccgttttctccatgcgatggagtgagaatgcatccgcttactcatccactgcctgtcacggcgcatgtctcattgttagataagaactctctcactccggccagagcatcagttaacggcaccacccgtacttctgaccaggactttgaaagcgtttatgcgcattgccagagtgaaaatgcctcagagctaactggataatcatacagtacatgcaggttataaaaccagcacgtccttgcaatagtttcagtatggtattagcattgatgcgttagatgatggctatctcactccagtcagagccaccaactcagggctggaaagtaaaaaaccgacgcaaagtcggtttttttacatccggattcggacaaggcttaatatgacgatgacccagtgaaagtatataaatcgtcactgcgatatataccgaagtgctccctccgccagctgaagaaatcgctaattcttgcaatgttagccactggctaatagtattgagctgttagataagaactctctcactccagccagagccaccaactcagggctggaaagtaaaaaaccgacgcaaagtcggtttttttacgtcctgattcagacctcctttcaaatgaatagccaactcaaaattcacacctattaccttcctctgcacttacacattcgttaagtcatatatgtttttgacttatccgcttcgaagagagacactacctgcaacaatcaggagcgcaatatgtcatttctgttacccatccaattgttcaaaattcttgctgatgaaacccgtctgggcatcgttttactgctcagcgaactgggagagttatgcgtctgcgatctctgcactgctctcgaccagtcgcagcccaagatctcccgccacctggcattgctgcgtgaaagcgggctattgctggaccgcaagcaaggtaagtgggttcattaccgcttatcaccgcatattccagcatgggcggcgaaaattattgatgaggcctggcgatgtgaacaggaaaaggttcaggcgattgtccgcaacctggctcgacaaaactgttccggggacagtaagaacatttgcagttaaaaatttagctaaacacatatgaattttcagatgtgttttatccgggaggcattatgttactggcaggcgctatctttgtcctgaccatcgtattggttatctggcagccgaaaggtttaggcatcggctggagtgcaacgctcggcgcagtactggcgttagttacgggcgtggtccatccgggtgatattccggtggtgtggaatatcgtctggaacgcgacggctgcgtttatcgccgtcattatcatcagcctgctgctggatgagtccggcttttttgaatgggcggcgctgcacgtctcacgctggggtaatggtcgtggtcgcttgctgtttacctggattgtcctgctcggtgctgccgttgccgccctgtttgccaatgatggcgcggcgcttattttgacaccgattgtcatcgccatgctgctggctttagggttcagtaaaggcactacgctggcgttcgtgatggcggccggattcattgccgataccgccagcctgccgcttattgtctccaacctggtgaatatcgtttccgctgatttctttggcctcggctttcgcgaatacgcctcggtgatggtgccggtggatatcgccgcgattgttgccacgctggtgatgttacatctctattttcgcaaagatattccgcagaactacgatatggcgctgctgaaatctcccgcagaagcgatcaaagatcctgctacgttcaaaactggctgggttgttttactgcttctgctggtgggatttttcgtcctggaaccgctcggcattccggtgagcgccattgcagctgtgggcgcgctgatattatttgtcgtcgctaaacgcggtcatgcgattaatacgggtaaagtcctgcgcggtgccccctggcagattgtcatcttctcgctcggcatgtatctggtggtttatggcctgcgcaatgccggattaacggaatatctttctggcgtactcaacgtgctggcggataacggcctgtgggccgcgacgctcggcaccggattcctcaccgccttcctctcttctattatgaacaatatgccgacggtactggttggcgcgttgtccattgatggcagcacggcatctggcgttatcaaagaagcgatggtttatgccaatgtgattggctgcgatttgggaccgaaaattaccccaattggtagcctggctacgctactctggctgcacgtactttcgcagaagaatatgactatcagctggggatattacttccgtacagggattatcatgaccctgcctgtgctgtttgtgacgctggctgcgctggcgctacgtctctctttcactttgtaatgagatactgatatgagcaacattaccatttatcacaacccggcctgcggcacgtcgcgtaatacgctggagatgatccgcaacagcggcacagaaccgactattatccattatctggaaactccgccaacgcgcgatgaactggtcaaactcattgccgatatggggatttccgtacgcgcgctgctgcgtaaaaacgtcgaaccgtatgaggagctgggccttgcggaagataaatttactgacgatcggttaatcgactttatgcttcagcacccgattctgattaatcgcccgattgtggtgacgccgctgggaactcgcctgtgccgcccttcagaagtggtgctggaaattctgccagatgcgcaaaaaggcgcattctccaaggaagatggcgagaaagtggttgatgaagcgggtaagcgcctgaaataaagcggcgatatcccccccacaggttgttagaaaagtgcgctttatttatgtcggatgcgacgctggcgcgtcttatccgacctacaaagttatgaaaattcgatgaatagtatgttatttgtaggcctgacaggcgtagcgcatcaggcgattttgctatttacacagtactccctgcgtgagattccaattatcgcgtccagcatggtgtatcagtgagctgcttagttatcagcgatacagcgcagtagtttaaagacgtactggattatgatttatcagtggtttacacaacaaattattaaataattataagataccttaacccattttattattacacatctaaaacatcacaaaaaaaatcacttcacacactatcagagaacataataactttttaaaatgagcgcattttgatagttgttaacgatttcctttacgatactatcactaccctttttttacacacaaatattaccgggtggagataaaagggaaatcaaaggtaattatatcaggaagatataacgcattacatttattgtgtgtagaagaaaatccattcctgttctaattatccaatttaaacatcttagcataaaacaaatgatgaataaggaattttatgtcaattgactttaccccaggtataataaatacatatcacggcgatatttataactgcacaacaaataccgataatgctaaaacgccagacacaccgaagtggccttgcgataattgggaagaacaacaacccattaattccacattctctggagaaggatatatctctgatcaatatgatttagcgcaacaccaacttcaacaaattaatgcgtgccacacgaacactacatatacaaatgcagactactcaaaagttgtggctcaacttgtaagtcttattactaacattgaaacgataagttcgacacaacttacgcaacagacacaatcaatacttaatcagattaataacattagatatgaaaaaaacaaaagtgctgaatgtcgaatcattgttatcgctaatcctaaacccgacaaggcaatcataactaaaattagcgtagaagagggaatacccataacattcagtgtccaaaccatgttttcagatactaattttattgctgaacaacgagctgacttaccaactaatataaaagatattcaaagcctgtatcaaaaaatgacgaagttatatattgagcacagtgaaaataaaaacaggatgaaagtctttgccggaaccaactttattgatttcaatatgacaggacagaacctgtccgggttcgttctaaccttgtcaaggttttatttcgaagatctacttaatataaatttcactgacgcaaatttagggaaggtgcgaataagcggggaaattcttctcggctgactcagtcatttcatttcttcatgtttgagccgattttttctcccgtaaatgccttgaatcagcctatttagaccgtttcttcgccatttaaggcgttatccccagtttttagtgagatctctcccactgacgtatcatttggtccgcccgaaacaggttggccagcgtgaataacatcgccagttggttatcgtttttcagcaaccccttgtatctggctttcacgaagccgaactgtcgcttgatgatgcgaaatgggtgctccaccctggcccggatgctggctttcatgtattcgatgttgatggccgttttgttcttgcgtggatgctgtttcaaggttcttaccttgccggggcgctcggcgatcagccagtccacatccacctcggccagctcctcgcgctgtggcgccccttggtagccggcatcggctgagacaaattgctcctctccatgcagcagattacccagctgattgaggtcatgctcgttggccgcggtggtgaccaggctgtgggtcaggccactcttggcatcgacaccaatgtgggccttcatgccaaagtgccactgattgcctttcttggtctgatgcatctccggatcgcgttgctgctctttgttcttggtcgagctgggtgcctcaatgatggtggcatcgaccaaggtgccttgagtcatcatgacgcctgcttcggccagccagcgattgatggtcttgaacaattggcgggccagttgatgctgctccagcaggtggcggaaattcatgatggtggtgcggtccggcaaggcgctatccagggataaccgggcaaacagacgcatggaggcgatttcgtacagagcatcttccatcgcgccatcgctcaggttgtaccaatgctgcatgcagtgaatgcgtagcatggtttccagcggataaggtcgccggccattaccagccttggggtaaaacggctcgatgacttccaccatgttttgccatggcagaatctgctccatgcgggacaagaaaatctcttttctggtctgacggcgcttactgctgaattcactgtcggcgaaggtaagttgatgactcatgatgaaccctgttctatggctccagatgacaaacatgatctcatatcagggacttgttcgcaccttccttaggtgacactatttttttacataaagaacaccctacccccaaattatataaagatggacaatatcttgacaaacaaatcgaaggtttattttcaacattattaaccattaatgacaaccttttacgagcaaaagcggaaattgcttcgacaataattaaatttttagaggccaggataaccaatctttcatacaatgacatattaaaatatcagcaagaattccaaagacaatgttataagcaagttaaagcctttacgacactctcccgatacaataaaattcaaacatgggcagaaatgtctgaatatcaattcgaagtatttcaatacgagacgcttaacccaaaaaaaatgtcacacacgccttatttaaagaggccactgcctaatgaaaaagatataaattatggggtggaaatagaaataccatctggtaaaagaattcgcttatcaaatcattaccagaatataataccataatattgattattagcactttataatcattgaataaaaatagattttatgtacttttaaaacaatgcactatattatggggtgatggatattcatgtcacgccccaaaattaactgagttcacctaaacagaaaggatataaacatcagacaggtttacgttactatcaggcatatcacctcagaatcagatgaaaactataaagaaatatctattatggttttaatatttgttgataaggatagtaacatgaacatgacaaaaggtgcactcatcctcagcctttcatttttgcttgccgcatgtagttcaattccgcaaaatatcaaaggcaataaccaacctgatattcaaaaaagttttgttgctgttcataaccagccggggttatatgttggtcaacaagcgcgctttggtgggaaggttatcaacgttatcaatggcaaaacggatacgttgttagaaatctctgtattaccgttggatagctatgcgaagcctgatattgaagccaactatcagggccgactgctcgccagacaaagcggcttccttgatccagtgaactatcgtaatcactttgttaccatcctcggcaccattcagggtgaacaacctggctttatcaataaagtcccgtataacttcctggaagtgaatatgcagggcatccaggtgtggcatttgagagaagtggttaataccacctataacctgtgggattacggctatggtgcattctggccggaaccgggctggggtgcgccttactacaccaatgcggtgagtcaggtaacacctgagctggtcaaataacaccaccgaaagatgcagatgctttctcagcatctgcatcatgcattacatcaaattaatacacagtaagctaactattattattataagccctgtcctgttaattacctttggcaaactgattataaagttaatgtccgcaccaggagtcggttatgtttcttataattaccagggatacgatgttcttcaccgcgatgaaaaacattctgagtaaaggtaatgtcgttcatatacagaacgaagaagagatcgacgtaatgttgcatcagaatgccttcgtcattattgatacattaatgaataatgtatttcattctaattttctcactcaaattgaacgattaaaacctgtccatgtcattattttctccccctttaatattaaacgctgcctggggaaagtgccggtgacctttgttccgcggactatcactatcattgattttgtcgcactcatcaatggcagttactgctctgtgcctgaagcggctgtgtcactttcgcgcaagcaacatcaggttctgagctgcattgcgaatcaaatgacaacggaagatattctggagaaactgaaaatatcgctaaaaacgttctactgccataaacacaatatcatgatgatcctcaatcttaagcggatcaatgagctggtacgccatcagcatattgattatctggtgtgaatttcaggcttacggtgagtctggctacgctgccacacagattagctaattgaaacgcctttcacccctgccataccttttaataatcgcaacaggtcttctatcgacgttgtggcatgaagctggatatcaatggcgaccacttcatgatcttcattttcctgcaacgaaactaaatcagtttttattttttgctgcttaaaccagtcgagcattgataccgtattaccgttcactaatgtcagctgtaaatggtaatttttgttcatcaggcggaaggttaattgatggaagacttccagcaccaacaaggtcatcactgaaccataaatacccagttcgtacataccgctgccaataaccatacctatggcggcggtcacccagatatccgctgccgtcgtcagacctacaatattttggttacgaacgagaatgttacctgcaccgataaacccgacgcccgtcaccacctgagcagcaatacggctggggtcgagtccgacgtgatctaaagacagcacgtcagcaaaaccatatttcgaaacaatcataaacagggcgcttcccatgccaattaatacatgtgtgcgtaaccctgctcctttgccgcgcatttgcctttccatgccaatagcgccacaggcaattgccgcgagtataagacgtataataaattctgctgtcatataaaaatgcaaaaaggagcagcaagatggctcaacttgctactcctttttacttgcacctcattaattcggcaagtcattagatgcttgatttttgaaggtatacaaatttttctgcgggtttttcttacagtattcgatcactttaggaatttgagtgagatcggtttcatttaaagtaacggtatcgccacctttatatactgtttcttcatgcagcatccaccatgcaaccggggtcattgcttttggattcagatcaataaattcctggcaggtcatatctttagcggattcattggctgccaacgcagattgtgcgttcaccagtgacaaagccgctacagcgcccataaaaataaacgctttacggagagatgaaatattcattttgtaacccattcaatatagagattatatatgaacaggaggaatagctgcttttaaagaagatattccggcctgttcaatatgcaaggaagtacgatgtaacgcattcccggaattacatatctttcttaattttgtcccattcgcctttaactttatctttaaagttggcttgtttatcctgagtacaagcctgaacgatagctggggttacggttgcaataccctgaacatctaaaaccgcatcttctggtttatctttgttgttcagcgcttcagcaaaaccaactgcagttggctggaaggattcgtccacagccaggaaatcttcacaggtccaggagttgaccggttttttgttatcagctgctttttgcgcatccgctgcattgctcacaactggcagaagaagcagaccaccaagaataacgcctaatacttttttcatcgtaatatcctcaactataaagtgaaagagccgtcacgaatcaatttcgacactgaggttataacctggttttctgtatatgtcatgttgatggaaaatatcaaaatcagatatttttatttcaatacaatgagttacagatgcatcagatactgcaattaggaaatttttattaaatcgactgcattcttagacgcgtttttggcatagattgatagcaggggattttcttcttaattttatagggtggttctatgttatatatagataaggcaacaattttgaagtttgatctggagatgcttaaaaaacatcgcagagcaatccagtttattgccgtgctgctgtttatcgtcgggttgctgtgtatcagtttcccgttcgtctctggcgatattttaagcacagtagtgggtgcattattaatctgctcgggtattgcgcttattgtcgggttattcagcaaccgcagtcataatttctggccggtattatccggtttcctcgtcgcagtcgcctatttattgatcggctatttcttcatccgcgcaccggagctgggcatttttgccattgcggcatttattgccggtttgttctgtgttgcaggggttattcgcctgatgagttggtatcgtcagcgttcaatgaaaggcagctggctacagctcgttattggtgtgctggatatcgtcattgcctggatattccttggtgcaacgccgatggtgtctgtaacgctggtttccacactggtgggaattgaactgatatttagcgccgccagcctgttcagcttcgccagtttgttcgttaagcagcaataattaccccggttgtcacccggatcatagtcacttgatgtgactatgatccgattaatactctctccgctacgcagtgttgtagatcaattgcgcactatcattgaaataattacctgctagtgattatttcaacctactgaatttcatctaatttttttcactctatggcaaattagccatttcaaacattatcatggctgatattttccgtagtcaggtttaatgttttaaaagtgctgtgggaaagtgaacaaagagttccgtaagcgttgatgctatgggcggttaaataagtaatccgggttcatttttttgcaactggcgttgattacattgcataaatatccgtgtctccagacgctatataaaaacctgaagacatgaatgcgttatttactcaggtaatttcaatgcgttaaaagaaagctggcaatccaattgccagcttaagtcgaaacaaggagactcgatatttaaatcggattacattttaactttagtaatattcttcagagatcacaaactggttattgataacttattcttgggcagtaatccgcaaacgttaactttttgtttgctatttacaagctgataacaaccaggaatcttacttaggatcaatatatggagtgcgtgatggataaatctgaagtattgattagtgttaatagacgtattagttcacgaagggtaaagttcttataggcgtttactatattgaacaacgattcggacaaggatgtaaataatgaaaaggatgacatattcgaaacgataacggctaaggagcaagttatgatttttctcatgacgaaagattcttttcttttacagggcttttggcagttgaaagataatcacgaaatgataaaaatcaattccctgtcagagatcaaaaaagtaggcaataaacccttcaaggttatcattgatacctatcacaatcatatccttgatgaagaagcgattaaatttctggagaaattagatgccgagagaattattgttttggcaccttatcacatcagtaaactaaaagctaaagcgcctatttattttgttagccgcaaagaaagtatcaaaaatcttcttgagattacttatggtaaacacttgccccataagaattcacaattatgtttttcacataatcagttcaaaattatgcaactgattctgaaaaataaaaatgaaagcaatatcacgtcgacgctcaatatttcgcaacaaacattaaagattcagaaattcaacattatgtacaagctgaaactaagacgtatgagcgacatcgtcaccctgggtatcacatcttatttttagtcaggacataagcaactgaaattgatggctggcatgacgagggatgcagatgctgatttcattacccccggtgattactaaaggagaggctaaaacgactttattcccctggtatgtgtatccaccagtagaacccttcgttgcccgaatgctggcaggaactgttggcagaacggcaacattttttttgtcgttgacctcaccatgtcgatcactgtgcctgtatcccaccttactggctgacaaccccactatgccgctggtctgtaaatccctcatatctctcctcgcgcgcaatttaaagaaccgttatttctcaagaattttcagggactaaaatgaacagaagaagaaagctgttaataccgttgttattctgcggcgcgatgctcaccgcctgcgatgacaaatcggcggaaaacgccgccgccatgacgcctgaggtcggtgtcgtcacactctcccccggttcggtcaatgtgttgagcgaattgcccggtagaaccgttccttatgaagttgccgagatacgtccccaggtgggcggtattatcattaaacgcaactttatcgaaggcgataaagtgaaccagggcgattcgctgtatcagattgatcctgcacctttacaggccgagctaaactccgccaaaggctcgctggcgaaagcgctctctaccgccagcaatgcccgcatcacctttaaccgccaggcatcgttgctgaagaccaactacgttagccgtcaggattacgacaccgcgcgcacccagttgaatgaagcagaagccaatgtcaccgtcgccaaagcggctgttgaacaggcgacgatcaatctgcaatacgcgaatgtcacctcgccgattacgggcgtcagcgggaaatcgtcggtgaccgtcggcgcactcgttaccgctaatcaggcagattcgctggttaccgtacaacgtctggacccgatttatgtcgatctcacgcagtcggtgcaagatttcttacgcatgaaagaagaggtcgccagtgggcaaatcaaacaggttcagggcagtacgccagtacagctcaatctggaaaatggtaaacgctacagccagaccggcacgctgaaattctccgacccgacagtggatgaaaccacgggctccgtgacgttacgggcgattttccccaacccaaatggtgacttgctgcctggcatgtacgtcacggcattagtggatgaaggtagccgccagaatgtattactggtgccgcaggaaggcgtcacccacaacgcccagggtaaagcaacggcgctcattctggataaagacgatgtcgtgcagctacgcgaaattgaagccagcaaagccatcggcgaccagtgggtcgtcacctctggcttgcaggctggcgatcgggtgatcgtttccggtttgcaacgcattcgtccgggtatcaaagcacgagcaatttcctccagccaggaaaacgccagcaccgaatcgaaacaataacgttgcaggcttaaggggactttcatggctaactattttattgatcgcccggtttttgcctgggtacttgccattattatgatgcttgcaggtggtctggcgatcatgaacttaccggttgcgcagtatccgcagattgcgccaccgaccattaccgtcagcgctacctatccaggtgccgatgcgcaaacggtagaagactcggtcactcaggtgattgagcaaaatatgaatgggcttgatggcctgatgtacatgtcttcaaccagtgatgcggcgggcaatgcctctatcactctgaccttcgagactgggacatctcctgatatcgcacaggttcaagtgcaaaataaactgcaactcgctatgccttcattacctgaagcagtgcagcagcaggggattagcgtcgataagtcgagcagtaatatcctgatggtagcggcgtttatttctgataacggcagcctcaaccagtacgatatcgcggactatgtagcgtctaatatcaaagacccgctaagccgtaccgcgggcgttggtagcgtacaactctttggttccgagtatgccatgcgtatctggctggacccgcaaaaactcaataaatataacctggtaccttccgatgttatttcccagattaaggtgcaaaacaaccagatttccggtggtcaactgggtggcatgccacaggcggcagaccagcagctaaacgcctcgatcattgtgcagacgcgtctgcaaacgccggaagaatttggcaaaatcctgttgaaagttcagcaagatggttcgcaagtgctgctgcgtgatgtcgctcgcgtcgaacttggggcggaagattattccaccgtggcacgctataacggcaaacctgctgccgggatcgccatcaaactggctgccggagcaaacgccctggatacctcgcgggcagtcaaagaggaactgaaccgcttatcagcctatttcccggcaagtctgaagacggtttatccttacgacaccacgccgtttatcgaaatttctattcaggaagttttcaaaacactggttgaggctatcatcctagtcttcctggtcatgtatctgtttttgcagaatttccgtgccacaatcatcccgacgattgccgtaccggtggttattctcgggacgtttgcgatcttgtcggcggtcggtttcaccatcaacacgttgactatgttcgggatggtgctggcgatagggttactggtggatgacgccatcgtggtggtggagaacgtcgagcgtgtcattgcggaagataagctaccgccgaaggaagcgacgcataaatcgatggggcagatccaacgtgcgctggtcggtattgccgttgttctttccgcagtgtttatgccgatggcctttatgagcggtgcaaccggggagatctaccgccagttctccatcacgctgatctcctccatgctgctttcagtatttgtggcaatgagcctgacccctgccctgtgcgccaccattctgaaagccgcgccggaaggcggtcacaaacctaacgccctgttcgcacgcttcaacacgctgtttgaaaaatcaactcaacactataccgatagcacccgctcgctgttgcgttgtaccggtcgctacatggtggtctacctgctgatttgcgccgggatggcggtgctgttcctgcgcacgccgacctctttcttaccagaagaggatcagggggtatttatgaccaccgcgcagttaccttccggtgccaccatggttaacaccacgaaagtgctgcaacaggtgacggattattatctgactaaagagaaagataatgtccagtcggtgtttaccgttggcggctttggcttcagcggtcaggggcaaaacaacggcctggcgtttatcagtctcaagccgtggtctgaacgtgtcggtgaggaaaactcggttaccgcgatcattcagcgggcaatgattgcgttaagcagtatcaataaagccgtcgtcttcccgttcaacttacccgcggtggctgaactgggtaccgcgtcaggttttgatatggaactgctggacaacggtaacctggggcacgaaaaactaacccaggcgcgaaacgagctgttatcactggcagcgcaatcaccgaatcaggtcaccggggtacgcccgaacggcctggaagatacgccgatgttcaaagtgaacgtcaacgctgcgaaagctgaagcgatgggcgtggcgctgtctgatatcaaccagacaatttccaccgccttcggcagcagctacgtgaacgacttcctcaaccaggggcgggtgaaaaaagtgtatgtccaggcaggcacgccgttccgtatgttgccggataacatcaaccaatggtatgtacgcaacgcctctggcacgatggcaccgctttctgcctactcgtctaccgaatggacctatggttcaccgcgactggaacgctacaacggcatcccgtcaatggagattttaggtgaagcggcggccgggaaaagtaccggtgacgccatgaaatttatggcagacctggtcgctaaacttccggcaggcgtcggctactcatggaccggactatcgtatcaggaagcgttatcctcaaatcaggctcctgcgctgtatgcgatttcactggtcgtggtgttcctcgccctcgccgcactctatgagagctggtcaattccgttctcggtgatgttggttgttccgttaggcgtcgttggcgcattactggccaccgatctgcgcggcttaagtaatgacgtctacttccaggttggtttgctgaccaccatcgggctttccgccaaaaacgccatcctgattgtcgaatttgccgttgagatgatgcagaaagaagggaaaacgccgatagaggcaatcatcgaagcggcgcggatgcgtttacgcccaatcctgatgacctctctggcctttattctcggcgtgctgccgctggttatcagtcatggtgccggttctggcgcgcaaaacgcggtaggtaccggcgtgatgggcgggatgtttgccgcaacagtgctggcaatttacttcgttccggtctttttcgttgtagtggaacatctctttgcccgctttaaaaaagcgtaacgtgtaaatgagagtaaggttgaacatgaaggttcagccttactctttcctgctaaccattcaccactcaacaaccagctaaccgtcaggaataccaggcttagtacacagcactgaaagtagaaaccactccagccattcgtcatcaatttgaacaacacaatactgacccacattcccgtaatcgtatgaattgtcagcttaataatcccaaacatgccgagtcttttcctcctgaaaataccgataccgcctggcaaactgcgaaagagaactagccggtagcccggcagaaatcatcagggaagagtttcacatgaagcaggtgtgagatcctgaccaatattcaaatgcgaaatatgtcaggaaaaggtacctggcgaatgttgcgcaaactgatgtggcgttacaccataatattgtcgaaatgtgtttataaagtacgatgtactgctatagccacatttttccgcaatagtatgcagaggaatttgacgtaactcgagtaatcgtctggccatcgacatcctggaggcgagtaatattttactgaaacaggtattttcatcctgcaacttttttttgattagactctcgctggtatacattctttccgcgatatcgcgcagataccaacgtttggcgatatcaaagctaataaggcgttcaacttttcctgaaacagtgctgatgctattgaaaagtaaggggatcagttctttcttatgagaaaacatcgataaacaggaaaggtagagcatattgctcagtatcggtgaatttaccccggattcattgaagctatcaaaaatcgccgtcaccagcggcatggggggtgactggttaattaacaaacggtctttgctgtgtaaccctaaattgcgtggtagctgacgaatattttgtaagtaatggcaaactgtcagctcatcgatatccagtcgtcgcgtatccggtgaacaaaacgcaaaatcgtctgccaaatttttctccagcagcagaatactctcgttatgcagcgatattttttgctgttcatgataaatatcgaatgaacgacgaatgaggatcaccgagcagacatgagtcatgattatcccttatatttcatactgcgattatttcaatttcagtatactaatgaaatgatgccagactgtttcttagcgcaaaaactgccagatttggtaggaccaaaatttatccacaaagtagttttgcataacagttaattgataataagtaaatgcagcacgaatatattttcgcacagcgtatagcttatgtttataaaaaaatggctgatcttatttccagtaaaagttatatttaacttactgagagcacaaagtttcccgtgccaacagggagtgttataacggtttattagtctggagacggcagactatcctcttcccggtcccctatgccgggttttttttatgtctgagtaaaactctataatcttattccttccgcagaacggtcagtgccgtaaaaattcccttgcgcaacaatacttgccgccgagtcacggttcgacaatctctgcgccgatcgctcctgatactctgtgggcgtcatcccataataatttcgaaagacgtaaatgaaatacgacacgctgtgatatccacaggatactgcaactcgcttaattgaaaaaccatgtataacaataagttgcaaagcacgttgcattctacactcagtaagcaactgtgaatatgatgtctcttcttcgcgcaattttttctttaacagacttggactcatcaacagctcgctggcgattcgggctagtgtccactcatgggcgatattattattgataaccgtacaaactcgtgttcgcatgttcggttgtaaaacgttcagaagcagcggtataaagtgctcatcctcaagaaaaacagataacaacgcaaagattaatgctcttttacgtagcatttctgcatagcgaagattcttattctgcgatagttgcgcaacttcctgaaaaacaggaatatctctactacagtgatgaacgagtaatgaagaaacttttttatgtgcatgaagatttaatgcctcctccttgagcatcgggagaaataatgaaagcgtgtcccttgacacgaatacaaaattttcaacacacttatctactcgaatttggcttgcatccgcaaaaaccaggtcaccgccattaaaatagcgatattcaccattaaccatggtgagaatatatttatgtcttgcatacgcaattagacaattcccatgtagtgattgcatagttgacttaatattacataaacatattactgtttattaatgtagcacgccgccctcttaagtcaaattgattgataaataaatttaaacgaagcgggagaacaggatgataatgtgtgatgttctacgggcaggatgactggatttataatacaaaaacgtgtttaagaacacagggaaattaatagtaagcaaataatcccttttcgtgacattaaaggtaatcgctacatttaataaacattcatataacatatatcttatcaacacgatgaatagacagccaatatattattgcgattaataagcaaccgaatgcccagctgtttttttaaaggctgggcattcggtttttacaacgttatgttatcaggtgtgtttaaagctgttctgctgggcaataccctgcagtttcgggtgatcgctgagatatttcagggaggctttgtagtcttccagcaacagttcagcaaagtccatttcgaagccgcgacgacacataatgcgcatcaccacgatgtcggtggcttcaccgccgagagtgaaggccggaacctgccagccgcgcagacgcagacgttcagagaggtcgtacagggtgtatcccggatcttcaccatctttcagtttgaagcaaaccgccgggatgccttcgtccgggcgacccgtacagatgaactcatacggccccagtttggcgatttcatccgccagataagcggcaacctggtaagaggcgttctgtactttggtatagccttcacgaccgaggcgcaggaattcatagtactgtgcaattacctgacccgccgggcgggagaagttgatggcaaaagtaccaatttgaccacccaggtagtcaacgttgaacaccagttcctgcggcagcgcttcttcgtcacgccagataacccagccgcagcccagcggagccagaccgaatttatggcctgaagcactgatcgatttcacacgcggcaggcggaagtcccagacgatatccggggcgacgaacggtgccaggaagccaccgctggcagcgtcgatgtgcatgtcgatgtcgataccggtgtcggcctggaatttatccagcgcatcgtgcagcggttgtgggaactcatagttaccggtgtaggtcacgccgaaagtcggcaccacgccgatggtgttttcgtcacaggcttcaatcatgcgtttcgggtccataaacaactgaccggggcgcatagggatctcacgcagctccacatcccagtagcgggcgaatttatgccagcagatttgtaccggaccgcacaccaggtttggtttatccgttggtttgcctgcagcttccatacgcttgcgccaacgccatttcatcgccatcccgccgagcatacaggcctcggaagaaccaatggtgttggtgccaacggcctgaccatttttcggcgcaggcgcatgccacagatcggcaaccatatttacgcaacgcaggtcgatggctgcggattgcggatattcttctttgtcgatccagtttttattgatcgacaaatccatcaatttatggacgttttcgtcgtcccaggtctggcagaaagtggccaggttctgacgagcgttgccatcaagatataattcatcattgataatctgaaatgcgacatcatcgcgcatttcgtgcagcggaaatcgttttgactccgcgatagtagaaatggcctttgcgccaaaacgtgaatcgagtagttctgagcggaaatccgttaacagcttctggtccatttcgaactccttaaatttatttgaaggcaataaaaaagtaggatttatccgcaatggaagcaaggcattacaggcttaatttaaataacaaaatcctaagcagaaaaacgactttttataatataaacatttaacatgataatattaaaaacagactttattatcgtaataaaaatcgcccaaacattgctgttcgggcgatcaaattaattattgtttatcctgcatatacggcgtgtacaccccgttcagactgtgcaggaaagctacgatatcatccacatcctcctgcggcagctctttgcctacctgatagcgcagcatcagtttcaccgccccgtccagcgtcggcacgtcaccgcgatggaagtacggtgccgttaaagcaacgttacgtaaaccgggtactttctgacgcaatttatcacgctcttctttagtcacattcatacgaccaatatccgccgccgtaatttccccaaagttaaagtcttttttcagccccaacggttcaaaggaacgtccgccgagaataataccaccatgacaagttgcacatttattatctttaaataattgatagccttttttctgttgcgccgtcagcgcattttcatctccgcgcaaccatttatcaaatggggaatccggcgtaattaatgttttctcaaattcagcaatggcatcagtaatattttcgccactgaaaccttgcggatagacttcgaggaactgcgttttaagctgcggatctttttccagcttagcaataatttcgtcccaggatttcgacgccatttcaatcgggttcaacggcggtccaccagcctgatcctgcaatgttgccgcacgaccatcccagaactgctcaacgttaaatactgagttaaataccgtcggcgcgttaatcggcccaactgcgccaccaacaccaatcgatgtttttctgccatcgacgccccccgcattcaacgcatggcaatgagcgcatgaaatggtgctatcagccgataaacggggatcgtgatacagcgcaaaacccaacgccactttttgcgcatcggtaggcagtttttgcgggatgggctgcaccggttcattgcgatgttccggagcagtatcattgctggcgtaatattccgcgcgctgttttgcaatccaggccagtatttccgcccgctcttcatcactcaccttacccgcccagtgtagcgcggtataacgcgttggtggcatagtttcatactgcatcacccattcaatcttattcaaatcgctttgcgaaacgggtttatcagccagcagtgccgcacgcacggcctcaaggttaaaagatttatatccaagcttaatgtcgtaatccatcaactgtttcgcgccaggaatataataataggcgggtaattctgccgaaggcgtgtggcaatagtcgcatcctttttcgcggagaaagcctaaaaccttattattttcactgacagcagatgcctgaacatcggcctgtttactgcgtttattatcgtggtaccacacataaccagataaccctaaatagcaaatcgcgacgccagccaggccgatcgcggtaatacgtgagaccattttcattattcttccctcacggtggtgagttattgtgacccagaaaattttccagaatgctgcaaacgtctctgcgagacaaagccatcataaaaaacagggagatacgctttttgataggaatcaatcaattacatgaatataaactatcaataagatagcctgtgcctattacccagatcaggaatggcatatcatgattgcggcgagagcaggattgaatgttctgaaaatgaaaaacaacaccaaatcggtatttttataaattccattgatattagtgcgttatattttttgacaggttaataaacgtgatccaccgcacgctttgtcgcccaccaggcggagcgaatgactacccttaaagaaaagccgataattagcgacgaatttcggaggttggatccttatgctcaatcagaaaattcaaaaccctaatccagacgaactgatgatcgaagtcgatctctgctatgagctggacccgtatgaattaaaactggatgagatgatcgaggcagaaccggaacccgagatgattgaagggctgcctgcctctgatgcgctgacgcctgccgatcgctatctcgaactgttcgagcatgttcagtcggcgaaaattttccccgacagtaaaacctttcccgactgcgcacctaaaatggacccgctggatatcttaatccgctaccgtaaagtgcgccgtcatcgtgattttgacttgcgcaagtttgttgaaaaccacttctggctgccggaggtctactccagcgagtatgtatcggacccgcaaaattccctgaaagagcatatcgaccagctgtggccggtgctaacccgcgaaccacaggatcacattccgtggtcttctctgctggcgctgccgcagtcatatattgtcccgggcggccgttttagcgaaacctactattgggattcctatttcaccatgctggggctggcggaaagtggtcgggaagatttgctgaaatgcatggccgataacttcgcctggatgatcgaaaactacggtcacatccccaacggcaaccgcacctattatttgagccgctcgcaaccaccggtttttgcgctgatggtggagttgtttgaagaagatggtgtacgcggtgcgcgccgctatctcgaccaccttaaaatggaatatgccttctggatggacggtgcagaatcgttaatccctaatcaggcctatcgccatgttgtgcggatgccggacggatcgctgctcaaccgttactgggacgatcgcgacacgccgcgtgacgaatcctggcttgaggacgttgaaaccgcgaaacattctggtcgcccgcccaacgaggtgtaccgcgatttacgcgcgggggcggcctccggttgggattactcttcccgttggctgcgtgatactggtcgtctggcgagcattcgtaccacccagttcatccccatcgatctgaatgccttcctgtttaaactggagagcgccatcgccaacatctcggcgctgaaaggcgagaaagagacagaagcactgttccgccagaaagccagtgcccgtcgcgatgcggtaaaccgttacctctgggatgatgaaaacggcatctaccgcgattacgactggcgacgcgaacaactggcgctgttttccgctgccgccattgtgccactctatgtcggtatggcgaaccatgaacaggccgatcgtctggcaaacgccgtgcgcagtcggttactgacacctggcgggattctggcaagcgagtacgaaaccggtgaacagtgggataaacccaacggctgggcaccgttacaatggatggcgattcagggatttaaaatgtacggcgatgaccttctgggtgatgaaatcgcgcgaagctggctgaagacggtgaatcagttctatctggaacagcacaaactgatcgaaaaataccatattgccgatggtgttccccgcgaaggcggcggtggcgagtatccgttgcaggatgggtttggctggactaacggtgtggtacgccgtttaattggtttgtacggcgaaccataatatttttacagccagccgctaacttcctgctggctgtaaaattatcctcttcaggaggagatatttaacatcattgccgcctgggtgcgatttttcacttccagacggcgatacagggattccagatgcgcttttaccgttccggtactgatattcagcgctctgccgatctccttatttgattcgcccgccgctaacatggttaaaatctcccgctggcgggcgcttaacgatttgagatctttaatgtccttttccggcgtcgtccgccagtctccaggcagaaacatcatccccatcgccgcactatttaccgccaacgcaaatgtctcgacggttgaatcacgaggcacaatggccagcacattaaaatggataacttcctgtaaccaccgtttattgcaatccgtcgccgtaattaacaccttaacctcaggaaattgcaccacggttttttgcagcaaccagtagcaaaactcaccatcctgatcgccatcgagcataactaaggcttcagggtaactttccagcttttgccataactcgtctgcctgactggccccctgaatactcactcctggaatacgctgctgtaaactgattttcattccatgaataaatattgactgcctgtcaaacatgactatttgcataactgaatctccacctgaatacgttaaaaagacttaagtagtggaagggtattacccgcgagaaaaaataagaattcgccatttggcggtggccattctacagagatgacgtgtagaaaatagttaccgatataaatagttacagctaaacgcctgaaattacatgtcgagggcactatttaaaacaattttgaggatttccttatattggtggttagtacgcatgcaattaaaaatgaaattccgcgaccacaagccaaaataacaaacggcaaggagacaaaaataagcacaaatagccaacacgtcctctgttcactttaaagggaatcgctgaaaaatacgctctgtttaaggggattcacctttctcagaaagctattccgcccttttcctgctgagaaatcgccacattcggcatgacaacattgtgaaacccggcattagatgttagaaaaaacaataaacaatgcgatatgcgcgttactgtttcgctgtgaacaacaatcggtcaaagaaatggataaaattcacgcaatgcagttgttcatcaaagtcgcggagctggaaagtttttcccgcgcagcggatttctttgctttgccaaagggaagtgtttcgcgccagatacaggcactggaacatcaacttggcacccagcttctccagcgcaccacgcgacgggtcaaactcacgccagaaggcatgacctattatcaacgagcaaaagatgtgttgagtaatctcagcgaactggacggtctgtttcaacaggatgccaccagtatcagcggtaaattacgcatcgacatcccgccaggaatcgcgaaaagcctgttactgccgcgcctgtcggaatttctctatctgcatccgggaattgagctggaactgagtagccatgaccgtccggtagatattcttcatgatggttttgattgcgtgatacgcactggcgcgttaccggaagatggcgttatcgcccgtcccctcggcaaactgaccatggtcaactgtgccagtccgcactatctgacgcgctttggttatccgcaaagccccgatgatctgacttcacacgcaatagtgcgttatacaccgcacctgggtgtacatccgttaggttttgaggttgccagcgttaatggcgtccagtggtttaagtctggcggcatgttgacggtaaacagtagcgaaaactatctcaccgccggtcttgccggtctggggattattcagatcccgcgcattgccgtgcgcgaagccctgcgtgccgggcggcttattgaagtattacctggctaccgtgccgagccgctctccctttcgctggtttatccgcagcgtcgggagctttcccggcgtgtaaacctgtttatgcagtggctggctggcgtaatgaaagagtacctggactgaccgactatactttttaagaatgaccacgacagaaggacaaaagagcggatgacgcaggaaaacgagatcaaacgtcccatccaggatctggagcacgagccgattaagccgttggataatagcgagaaaggcagcaaagttagccaggcgctggaaaccgtcaccaccactgccgaaaaagtccaacgccaaccggttattgcgcacctgattcgcgcgacagaacgctttaacgatcggctgggtaaccagtttggtgcggctatcacctatttctcatttttgtcgatgataccaattttgatggtgtcgtttgccgcagggggctttgtgctggcctcccatccgatgttgctacaggatatcttcgacaaaattctgcaaaacatcagcgatccgacgctagccgccacgttgaaaaacaccatcaacaccgccgttcagcagcgtacgactgtagggcttgtcggcctggcggtggcactttattccggcatcaactggatgggtaacctgcgtgaagcgattcgtgcccagtcgcgcgatgtctgggaacgctcgccgcaagatcaggagaagttctgggtaaaatatctgcgagattttatttcgctgattggtttgttgattgcgctgattgtgacgctttcgatcacctcggttgccggttcggcgcagcaaatgattattagcgccctgcacctgaacagcattgagtggctgaaaccgacgtggcgattgattggcctggcgatttccatcttcgccaactatctgcttttcttctggatcttctggcggttgccgcgccaccgtccgcgcaaaaaagccctgattcgcggaacatttctggctgctattggttttgaagtgattaaaatcgtgatgacctacaccctgccatcgttgatgaaatccccctctggcgcagcatttggttccgtgctggggctgatggcatttttctacttcttcgcccgtttgacgctgttttgcgcggcgtggattgccaccgccgaatataaagacgacccgcgaatgccggggaaaacgcagccttaaaataggccggatgcggcgtaaacgccttatccggcatacgattttattcggcctggctccccgtaggccggataagatgcgccagcatcgcatccggctataatgcgcacataacctcttgaaactcgtccccagagcctcttcagccatctatttgggagcaaacaatttcattccaactcataaccccagcatataaatccagttggtaacttttatttaacctgaaaccagttttatccactatttataaaattatgtgaagcatttcatagaagaaaaatcactggcctaaacattatcccctttttgcctgatttttgaccatttccgcgatttgttacacattgaaatatcacttttgctgtgcgtaatatggctattcgttagccaaaaaataagaaaagattatgcaagcaacagccacaacactcgaccacgagcaagaatacacgccgatcaactcgcgtaataaagtccttgtcgcctctctcattggcacagccattgagttcttcgacttttacatttacgccactgcggccgttattgtgtttccgcatatcttcttcccgcagggcgatcctacggcagcaacgctacagtcgctcgccaccttcgccatcgccttcgtcgcgcgccccattggctctgccgtttttggtcattttggcgatcgcgttgggcgtaaagcgacgctggtcgcctcgttgctaacgatggggatttcgaccgtggtgattggtctgctgccgggctatgccacgattggtattttcgccccgctgctgctggcgctggctcgatttggtcagggtctgggcttaggcggtgaatggggcggcgcggcgctgctggcgactgaaaacgccccaccgcgcaaacgtgcactgtatggctcctttccgcagctgggcgcaccgattggcttcttctttgccaatggcactttcttgctgctttcctggctactgaccgacgagcagtttatgagctggggctggcgtgtgccatttatcttctcggcggtgctggtcattatcggcctgtatgttcgcgtgtcgctgcatgagtcgccggtgtttgagaaagtcgctaaagcgaaaaaacaggtgaagatcccgctgggtacgctgctgaccaaacatgttcgcgtaaccgtactgggtacgttcattatgctggcaacctatacgctgttttacatcatgacggtctactctatgacctttagtaccgccgccgcgccagttgggcttggcctgccgcgtaacgaagtgttgtggatgttgatgatggcagttattggttttggcgtgatggtgccagtcgctggattactggctgatgcctttggtcgccgtaaaagcatggtaatcatcaccacgctgatcatcctgttcgcgctgttcgcctttaacccactgctcggttctggcaacccgattctggtttttgccttcctgctgctggggttaagtctgatgggtctgaccttcgggccaatgggtgcgctgttaccagagctgtttccgacagaagtgcgttacaccggagcatcgttctcttacaacgtagcgtcgattctcggggcttccgttgcgccatatatcgcagcctggttgcagactaactacgggctaggtgcggtggggttatatctggcggcgatggctggcttgacgttaatcgccctgctgctgacccatgagacgcgacatcagtcgttgtaataagagtgaaaagcctgatgcgctacgcttatcaggcctgaatttccatacaatatattgaattcgcaaggatttgtaggccggataaggcgttcacgccgcatccggcatgaacaaagcacactttgccaacaatctaaatctgtttaattgccggatgtcagacatccggcaattatcatcacttcttcatctgcgacaaaatcgtccgacactgattagcctccccttcggaaggtgagatcagtgccagtaacgccgccgccggtgttaccagcgttgccagtgccgcagcaacagcaccacgggcaatcagcggtccggctttcaccccagcctgcggatttttaaacgtcccccgcacatacagcggcgaacgcagtgtgataatccgaattcctttactctccggatcaatagtcaaatccagctgttccgaagcaaaacttgccgtgccggtaacattaatcaacgcgttctcagtatcgaaagcaaaaatctgcgggcgcgccacgccgttggcaatattcagattcgccgccgcgcagttcacccgcacctcatcatcaccaaatatcgcaccgacaatgtagttgccgacattcagcccaacaatctccatcaggttgcggctcaccagcccgtcattcatcaacagtttcaggttgccgttactgttgcctaaaagtgccgccaccgagttaccgctaccgcgtagttccgcgtcaccgttcatttcccccagcgtcttctgcatcagttccacatcgggcatcagttctttcagtttcagtcgacgagcctgaatatctgcccgcccctgcatcggctttttatcgccttccagatgaatattcgccgcaatgctgccgcccgccatgccaaatttcagcggttgcaggcgcaggtcagcatttttgaggatgatatgagtagaaagatcgctaatcggcaggctactgccatgctcaatgcgccgccctttgaagcgaacatcggcatccataacgtcccatttatcggtttcgaagcggtcataaggcagcactttgcccgcaggctgaacgcttttttcgcccttcttctgttcagaccgtttcgacttttctgcccctttcccggaatcaacgccaatcaacggtcccaggtccgccagccgcaattgccgcgactcgacatcaccttccagttttggtcgtggctttccggtggtgtagaccagagaaccgtggatatcgctatcaccaattcgcccattaaaaccgcgataatcaaagaccgacgatttttcagtgtcgattttcgctaccagccgaccatccgtttcaaacggcggggtatcgggcagcagaacgcccgtcagttcatagagatcacccagtgaatcgccagaaaatttaagccgtaaatcgacaccgcccatcttcattgggtcattcacgacgccatcaaaagcaacacgggtgttaccagagcggaaatcagcctgtaccggaaacggcgtcccttcgccacgcagcgccagcataccgcctatttttcccgtacccgtgagcggttcaccgttatatcgtccctgcgccttcaggccaaaaacgtaatcgcccaccttttctttatccgctttacctttcgatccagtaacttcgctgaacggcagcggcttgcctaagggatcaacaaaaatctccagatccgctttgcttactttgtcatcaatggcgatccgcccttgatcgaaaagaatattatccagccgaaacgaccatgccgacggctttgcattcgcgtctttgttatcatcgttggcaagattaaacgtccagttattgttcttttcagagaggcgaatcaggcgcgcgtcgggcttttcgagcttgatccacggcagccagaccgttttggtcagcagcgccagcggggccagcgttgcctctacgcgtggcaaatgcaccatcgtgacttcgggaatatccggtggattgccaagaatgatgtcttccgcgtgtacatggggccacggcacccagctgcgccagccagtttcttgtttttgccgctcccacaccacgcccagatcgccacggatagcgaacggacgattcaactccgcagagactttctggttgatagtcggtttgagtcgattccagtcaaaagttgcaatcaaaatgatcgccacgacaatcaacaacaagaaagcccctgaaatcgcagcggttattttgcctgccttgctcatcgttcgcttcctcatattcttcctgtgccagtcctaaagatagtccagccaggcggaaaatgaggcagcttatagcgccagaaccgccgtattcagcgtttctatcggtgccgggcgtgaaagaaaccagccttgtgcggcgaatgcgggcgagttctgaacatcacgccactcttccggcgtttctacgccctcgacaatcaccccgcgacaatagcgattcattagatgtaaaagctgagaaaagagtgtgcgtccttccggcgactgacgcagcatcacaaacagttctcgcgcgattttgatgtagtcataacgcacttcacttagcgcagagaaatttgccatcccggtaccaaaatcatccagccacagcgggccaaattcacacatcgaggcaaaggttgaatctttcggcagacggatatgctccaccagttcgaaacgcagccagggaagacgctcaatctggcgcaggatttttggttgctgacgcagggcgatgagcgtagggccatcaatattgaccgatgccagcaggccgtgctctataaagaagtcggctttttgcgccagcaaatcaatctgctctttcacaacctccatccgatggctgacggtgatttcagtaaaatagcgatccggcggcaggcgttgcgaagggttcaagggatgcgtgaccaccgttaatagctccacggccattaaccgcccgcatgtttgatagatcggctgccaggtgtaagcacgctcacactgcaaccaaaaacgccgttcctgcaagctctcgatgcttgcttcagggttgcttattcgctggataacctgccttatcatcaaagatgtcctgtgtttaaaagtgatgctgcccggactcgacaaagattatcggcgcgtaagggcagaactttaccgcctggccggggtaaatttcctcactccacaacggaatctttcaggaatacgttctggctcaaaaaaataatggaacactgttttaatatggttgaccagcaaaccaccacagcgcaaactaacgctaattttttacagatcaggttcacgactatgtccaaaaagattgccgtgattggcgaatgcatgattgagctttccgagaaaggcgcggacgttaagcgcggtttcggcggcgataccctgaacacttccgtctatatcgcccgtcaggtcgatcctgcggcattaaccgttcattacgtaacggcgctgggaacggacagttttagccagcagatgctggacgcctggcacggcgagaacgttgatacttccctgacccaacggatggaaaaccgtctgccgggcctttactacattgaaaccgacagcaccggcgagcgtacgttctactactggcggaacgaagccgccgccaaattctggctggagagtgagcagtctgcggcgatttgcgaagagctggcgaatttcgattatctctacctgagcgggattagcctggcgatcttaagcccgaccagccgcgaaaagctgctttccctgctgcgcgaatgccgcgccaacggcggaaaagtgattttcgacaataactatcgtccgcgcctgtgggccagcaaagaagagacacagcaggtgtaccaacaaatgctggaatgcacggatatcgccttcctgacgctggacgacgaagacgcgctgtggggtcaacagccggtggaagacgtcattgcgcgcacccataacgcgggcgtgaaagaagtggtggtgaaacgcggggcggattcttgcctggtgtccattgctggcgaagggttagtggatgttccggcggtgaaactgccgaaagaaaaagtgatcgataccaccgcagctggcgactctttcagtgccggttatctggcggtacgtctgacaggcggcagcgcggaagacgcggcgaaacgtgggcacctgaccgcaagtaccgttattcagtatcgcggcgcgattatcccgcgtgaggcgatgccagcgtaaacgcagcatatgcaaaaggctggataaagtgttacccctctatccagctcatccataaatacctgatggttgtgctaactcatcaccatcaggcattactgtgcaggtggaatatccgtcacttcaggatgtacgtcatccgtggcgacagaggtggtcgcagcggcggtagatggggccatgatttgatcccagaccgcctgcaacgctttcatgttaaattccggctcgcctttcggctgcagcagtattaacgccatatcattcgacaactgttgacgcagatcctgatttaacatctctaccgtcaggctattaaggaaatcctgccgcagtttctgatattgctccggcgcgatatcgacaacctgattttgcaacgaacgcatccgctgacccatcagaatatcggtatcagctcgtgcataggcggcaaacagtttctgcagctccagtttcttttgcgccactaacgcattgaactcttcttccggcagacctttatcgcgaaccttcgccagttcacgcgccaccagattaaggttgctgttcagcttgtcgtttggtgattcgatgttgatggcacactgcgcacgcagatacagcacacggcagtcaaatccaagaccgatgtctttgctgttactggcacttaacgcttgctgaacatgccagaacagcgcctcgcgggccaggtccgcacgccagtagcgcagcagtgcggctgattcacgaatcggctgccacggcgtatcccacatgatagataaccggtcctgacgcaccgcgtcagtcataatactcaccgcttccgcacgcagcggagaaagcgtcggcaccggagctggcgtttcacgtttgcctttcagttcgccaaacgttttgtttatttggtcgacaaccgagcgcgcatccacgtttcccaccaccagtagcgtcattgcatccggggtgtaccatttctgatagaaatctttaattttttccgcttcaacgggttgtttcagcggatcggcaggatcgtgacctaacaaggttgaccctttcagacgatagcgccaccagccctctttagtatcggcaggccaggttgccaccatgtcctgactttgcagcgcgtggttgatggtttctggtgtgatggtcaatttgccagtggcatttgccagataagagagcgcttctttcagcaaatcgttacggttattgggcaaactcagattaaacagcgtggtgtcataagagacaattaccggcggcatcgggcgtttagggtcgatcccctgctgccacaatgaacgcgcctgtgctgcgtcaaggccaccgctttgcgttagcgcaatacgagggatggcgtgactgtaaccgctctgttgtgtactttcggcgagcgaaccggtattaaccagcaggcgaatttcaacacgatcgctgggacgctggggggtggtcagcacttgccactgtaaaccgttggaaagcgtcccctgttgccatgctggatcaggctggagcgcatctgcctgcacatagccagcagtggccatcatcagcaaaccgcccgctaaaagtcgaatttttgtgccctgcatgtgaacccctgatcaactatcctggtaataaaaaaactgcccgttgtcggtcagtctaaatgacgttaaaaacacttcgtgttagaccgcaagaacatgaaaatgtcacggaagaagtgaaataaacctgaactcacccaggtggtaagttcaggcacaggggtcaattatgcgcaaacacccgcactcggggaagggagtgcgggcataagtgatgagattaagaggataattcgtgcgttttgccatccggcgcacgattattcagcacatcgtccagttttttgtggtccagttctttcacccacttagcaacgacaatggtcgctacgccgttaccgaccaggttagtcagcgcacgagcttctgacataaagcggtcgataccgaggatcagcgccagacccgctaccggcaaatggcccaccgcagagagcgtcgccgccagcacgataaagccactacccgttacccctgccgcccctttagaagaaagcagcaacacgattaacagcgtgatttggtggacgatatccatctgactgttagtggcctgggcgataaacaccgccgctattgtcaggtatatcgatgtgccatcaaggttaaacgagtagcctgtcgggatgaccagccccaccaccgatttacggcagccgagtttctccatcttgtcgagcatacgcggcagcgccgactcggaagatgaagtccccagtacaatcagcagttcttcacggatgtagcggataaatttgaagatactgaaaccagtcgctttagcgattgaacccaataccagcaccacaaacaggatacaggtaatgtagaaacagataatcagctgccccagttgcaccagtgtgccgacgccgtatttaccgatggtaaacgccattgccccgaacgcaccaataggtgccagacgcatgatcatattgatgatgccgaagatgacctgcgagaaactttcgatgacgttaaaaatcagttggcctttgctgcccagacggtggagcgcaaaaccaaacagtacggcaaacagcagcacctgcagaatgttaccgctggcaaatgcgccaatgacgctcgccgggatgacatccataatgaaggcgacaatgccctggtctttcgcctgatcggcgtaaaccgctaccgctttcgcatcaagcgttgccggatcgacgttcattccggcaccaggctgcacgacgttaacgatgataagaccaataatcagcgcgatggtactgacaatttcaaagtaaagcagtgcgactgcgccggtacgaccgaccgccttcatgctttccatgcccgcaatgcccgttacgacggtacaaaagatgacaggagcgatgatcatcttaatgagcttaacgaagccgtcgccaagcggtttcatttgctcgcctatttcaggatagaaatggccaaggagaataccaatggctatcgctgtcaggacctgaaagtaaaggcttttaaacagagaggttttcatagggtgtcctttagtaaaaccacaggtcttgtaaggttatggggtacctgcggccttaaaataacacccagacaacatcacagaaatgtacctggatcataattgaaacaaaaaggttaaaaagtttgagctggctcgcacaaaccagcactttttaaagttttgtaatcagtttggggtagctacttttcttccaggtaactctcttcgaagatttcaatagggagtgggcgagcaaaaaggaagccctgggcaataccaacgcccgcttttgccagccagtcgcgttgtgcttcagtctccacgccttcggcaatcatttgtaagttcaggctctgcgccagcatgataattgcagcaatcatgctgctatctcccggcaagccttcaacaaacattttgtcgattttcagtacgtcgattggcaacgatttcatatgctgcagctgacgcagccctgcgtagcccatgccgaaatcatccagcgccacccgaactccggcattgcgcagcggacggaggattgccaccgcagcatgagggtcgtcaatacgtcggctttctgtcacttccagaatcagtgttcccggctgaatgcgatagcgggttaacagttccagcatatccgccaccatattcgggtgcatcagttgcagcgcagagaggtttaccgacaagggcagcataatgccgcgctcttgccaggctgcaagcaatcgacaggactcttccagcacccagtgaccgacggtaaccatcagcccacagcactcaatgcgatcgattaagccatccggcaggtcccaactgccatccggttgctggatacgcagtaacacttccgcactgaccagtttaccgctggtcatctcgacctgtggctgtaaccaaatagcaaactgatgattttccagtgcattaaggatatcgctctcttccgtcaaccgcttctgggcggcttccatctgctgcggatcaaagaactgaatctgattcttgcctttatggcgagcggtaaatgccgcagaaatagcgcgactgtaaagctgttcggcggtgagatcgccgtagaacatcgccacgccaatgctacagtgcggacggagttgaatacgttcaatcggcaggcgctcgctcatgatagtgagcacttgctgacctaaggtgattgcgtgccacggttcctgtacaccgttggcaatgacagcaaagtcataaccgctaatctgcgcgaggatcatacgtggcgacagtaccgatttgagtttttccaccagcgtcagcagcagaatttctcgttgcgcctctttcagcacgcccgcagtatcacgcagggtttcacaggtgatgatcatcagcgcggtggtttgtttacgcgcgacaacctgctccagcatctccatcagcaaggctttgttcggcaaatccgacaccgggaagcgcatcgcattttcgttctgttcttcataatggcgctgcagcaattgctggttgaggttgtaactgcgcaccaacataccgatttcatcgtcctgatgcagacgcggtaatgccagttggtgaccaacaagctccttggctgggatggcgttaagttcgcgagcaatattgcgtaacggatgcaaaatcaggcggttaatgcaccagctgatggcgacggtcaggataagcgacaaaagtaagtaaatggtcactaacgttgagagggtgctcatcacgaacttatacatacggaaggaatccgcctgtagtaccagataggcaattggctgcgggtttgccggacgttcgagcgagtaaacgcccagcgagatttgaaccggtagctcaaacaggcgagtaaccattaccggcaccgggcgctctggaataaaacttttacgcagcgcctggaactggttaggcagcactacatcggcacggctgaccacgcctgccggtttaatgctggcaagaatagcttccgcttcgggaatatcgcctttcaaaatagctgaagataagggttcgcggacagagcgagcaatgctttccagttgcgtagccgtgttatagcgattctgctggaccagatggaacagcaaaacggtgcaaaaaataaaaacgaacaccaggacaacggctgccaccattgccatctgcttgattgttaacgagcgacttacgcgcaaattgtctccccccggaaatcccagattgccgcccgagtatacccgatcgcagcggcattaagagaggcgctatctgaaaacttaccagtcggcgtaaggtatcagcggctgcggcggtaaatccatgtcaccctgccatccggcggcggaataacgtacgtagagcaggaaatggctgggtgcgtaatctttcgcctgctggatatcaattgccgtgccaacaaaccagttggaagtaacacgtcgttcaagtaatgcccgcgccgtgtagccgaagccctgactgctgccgccatcgttggattgccgcgcagcttcttcctgccagtcggtcgggatcagattcatcagcggataacgcggcatggttttggtgcgtgaatgcgaccacgagccagacgcacccagctcccacgaccagttttccgtgcgctcccgccacatcaccggtatggcaaacgacaggtattcctgcggactgtagtaaccgccctgaccgagtgagtagccactcagatctttgtcgtaatgccagatcatgttgttcaggccgattgtgacgcggcgattgttctggttaatgaccttatagtaatagcccgtcatccagcgcacgcgccagttatcttcgacatttttaccggttaactggtcgccactaagcgatgcccagacgccgtttgcttcacctttatcgtagctcagacttagccccacaccgtcggcacgtacgccaccccattttttcccggtattgctcggggagtctttttgcccaccaaaggccagcaaagaactggagatgggccgacggtgggcgttaacggtgtaacccagcggcccgatatcatcgctgtaactgatgccgccgaccacatccaccacgttgaagcccatcggcgtggtaccgatatcccagctccagacgtcatttcgccagccgaccgccacgctggcaccggaatccgactggctgcggttgccgctacagtcctgtaatgtacaggtgccccagttgtcatcccatttgccatcggcattagtggagaaactgccgacgttcatattgacgaaatcactgcgaaagaacatccgcccgtcagaatacggcgcatccacctgcaacatggtagtgtgcgctttcagatcggagtaaccaccggtgccgctcgaaccccagtaatcgtgctcaagggtgacgttaagatcctgctggcgatagaggtccgccgcatcgctgcgcacgccacgtttcagccagtcatctttctcgtcgttacgggtcagtcgggtaaaggtgtcgttatcctgcggacgcgtcgtagtcacaccggatgcgaccatggcgtctttgtaggtttccagcgcctgcgttggatcgcccgcctgcgcttcaaacttcgcaccatcacgcagcaccatcgcgctttccatcgacggtggctgagattttgcctgcgggatcaacttattaaacgtccgctgcgctgctgcggtatcgccaagctgcgcctgtgccagcgccacgcgccgctgtgtgttcagcgaggcgttatcggtagcgggcagtttcgccagctggctacgtgccgccgctttgtcaccggcagcaatatccacttccgtcagaccaagaatggcgtcggcgttagctggctcccgcgtcaggacattctgatatgcagcgcgggcggcggtgtaatcacgtcgttgttgcgcccagtcagccagcgtgaggtcaatacgcgtggaaggtggttgctggcgcagcatcgcttccgcttctgcctctttgccgctttctcgcaggcggttagcggtttccagcacctgatcgctttgcagtcgattaaccagctcctgaatattgctgttccactgcgcacgcggcaggctattgatatgcgccagcgccgctctgtcctggtcatgaccagagaggtacagcccgtaagcgtaaacctgctccgggtcgttcgacttctgctgcgccagattgcgcattaacgtatcggcctggctgcgttgtccggcctgccagagatcctgcgaaagtcggtaagtaatccatacgctgccggggtccagcgccagtcgttgccgctgaagtgctgccgcctgcgcccatttgccctggttttccagtgcctctgcctgctgtgccagacggtcgttttgcaggctgcgttcgatatcatcaatgctacgccgctgactggcagagagcgaggcgataaacgcttcagctttttctggcgattgctggcggtaaatatttgccagcccgcgcacggcgttagtgttgccgctgtccatacgcaaggtctgctgataataacgttcggcggcgggataatcttttcgcgccatcgccacatcgcccagccccagcactgcataactgtcggtgttatcgacattacgcgcctgctggaacaggcgttctgcccggtcaggattattggctttcagcgcagcatcgccctgctggatcgccagccagtagcggtttactttcagcagactgttccatttgtcgttgttgctgctgtgcgggtccagtgcgagggctttttccagattcgccactgcattggcgcgatcgcctttctgagaatacgcctggcccagcgcccccagagcttcactgtctttcgggttcgcccgcaccgcctgttgtagttcgggaatggctttacccgccataccagagtccaccgccgctaaaccttgcgcacgagcgcggaaagcaggatcggccagctgtttttgctgttctgccagttgcgattgcgcagccgccacgctatcgccatcactaaagatcgagagatattttttcagcgccgacacactggcatcactgacgggcatgtctttaatctgcccgtaccagattttagaggccccttcgcgcccggcgttcgattttgccatctgttccaggacggcaaaaccttcgtcacggcgatcgctactaaacagcaatagcgccagattgttttgcaggcccgtattgcccggtgcatccgcattgatgcgttttaactgattaatcgcttcgccacggcgagccggaattttcgccaccgtactccagtactcgacagcaatgtcaccttccggcggcgcaccgttgaacagtttgttgtaactcgccacagcttcttctgcatgaccggtcgtcgcctgcaatcgtgcctgttgcagtgcctgacgaccatccggcgtggaaagtagcatcgtagtccgcgacgatttatacgcatttgaactcggcgctaactgcgacagccgatcgagctgtttttgcgcgccatcaatatcgccctgacgtaacaaagaacggaaacgggcggcaacgacgtccgggttattcggatcaataagttccagccgatataacgactgttgcaccagatcttcacgatgggtcgcttcgcctaaccgaacttgctccagcaactgttgctgagcggttggtgctgcctcgaccatcggcatgacggccagaccgagggaaagcgtgaatatgtttagtgtgaatttgcgcattcctggccccagtcaggtaataactcaccttttgtcgagaagcggaaacggtgttgatcccagccttgtccaaacagggtcagcacatagttgtaataggcatcgctgccgggaaagttatcggccacgcgctggcgctgaacggcctgcgcatcgcggttttgtaaaaagggcagcatggcggcagaaaaaccgactggtcctttaccctgcgctttccccgtagccacatccactttttccggcggataaccgtttttctcagtgaatgtcgccatcggtttaaaccggttgagcatccgcgctttttgcggatcgctgtcaggcatcatgcctacccacatgtaaacgcggatagcgtcgtagctgctgatcaatgttttttcggcttttagctgccagcctttgtctttctcatagcgcacccagtctggcgaaaaacctttcggggcggtttccagcaataaacgttgattggtttcgcgcagcgtggtccacggcgcgccaaagcgggtgaaatactgcgccagcgtcggcggcaggtagctggggttaaaacgccagctgttatcctcagcaaaacccactttgcccggtaacaacatggaacccagcccaggcaccgtcaccacttcctcccgcgcgatacgttttagcaacgcgctgccgatgtcggtataacgctgctctttccacaaacgccccgcctccagcaacgaccaggccatccagacatcaccatcggaggccgaattgctgtccagcacttcccacttactgttctctttcttgccccacagccaggcgggcaaacgttcttttaaagaaccctgagcgagattgttctgcgtccagtcgagaatattatcgaaagctgcacggtcgttagccgccagggcagagaacatgccgtaactttgcccttcggaggtggtgattttgcgcgcgtcgctggggtcgatgacgcgcccttcctgactgatgtaatcctttttaaactgctcccaggcaggccaggtacaggctgcctgaacactaaaggcagccagcagcagcatcgtcacgattccactacgcaacacattcatcttcaattactcgttatccgggttaagacgacgacgactaataattcgcagcagacgccacagtacccatgccagcaatatcacactgatagccgccagcaccgccagcagaatcggatggtttgccagcgcataccacacgcgctcgaaccacggcagatgacctacgtaataaacgtcgccaacacgtaggctgttgataccggactcgcggatcaccgcgaccgaaccgaacatggtggcgcgtttgccgctatcgttcaccgcatcgttaagcatttcataaccgcgtgggctatctgccaacagcgcaatcacgctgcgctggtcgttatacggcgactggaagccaatcaccgccgccatcgcaccggaagaggtcagcgttgaccgggtttctgccgcgcgatcgctctcgtccggcacaatgccggggaacggggtctggcgcatcggtgttttcacccagctttcggtcgcctgcaccaataggtcgatctgcttatcgtctttcagtttgtccgggataccaccgatgatcatgatgtcggcatctttgccctgaatggtgctgccatcatcggtcaccgtcagattaatcgccgggaagcccgtctgtgcgccgataaaaccaacagtattcagcaacgtttccatctgtgcttcgttaggcgctttcggcatcacggtgatggtttgcgacagatccgccatccggctgaatgggaagcccgcgttagcaaaggcgcgtagatccggcatcgggatgaagtggtaatacttcgagaagtcgatggtggagtcgtcaccaatcaccacatgattctgcaccggctggaaggtaatacagttatccaccgaaccgcccggcatcgggttcatatactcaaagtcgaagcgcagctggttggtcgcgcccagtttcagcgccggaatagagacatctgttttgccatccagcaaaccttgtaataccggaatccgcagcagcaggcggttcgcctcctgtttgctgctcaggttgaaggattgcaggaactggttattcaggctgatatccatccgcgaactgtctttcaccggcggcatggtgtagcggtaattaatatccatatcaatgccggtactgcgcatcaggtagagatccggcggcaggtttagcgaaacgttaatcgctgctggctcaagaccgctggattgtaactgttcttcataggttttcagttcgccaaatgtgaccggacgatcggtacgtacccagttcggcgcatcgtacggcttacgcggtagcagcggtttcacttcattcactaccacgctttcaccacggaacagaatgttaccctgagcgatacctttcgctgcctgcaacaggtctttgtcgtcacgaccaaacaccaccagcagtttgacgtaaggattctgcggatggttaatcatctcaatcaccggggcttttaccgccggatgatcgcgcaggaagtccggccgtttgtcgttggttgcaaagacaatggcattgcgatccggcagttggttatagagtaccgggaagttctgcccacgccagccagaacgcgaaccaaaccacgaggcgacaatggcagaggcttgttgcagcccaacatccggcgcacccgcaaagaccatcggcaaggtgttggtgcggttatcgctcgggtcaaagaatggcaccgggaagtgtgacaggtcattcttcacattcagggtctgataggtcagatccagtccactgctccgcccaacatccagccaaagcgtggtgctggccggtttttcgcacacgtcctgataatggccgacaaactccagccgtacacggttgaagtcgctaataaacagtgggttaatgggcatttgcgccagcgtttttttacccaactgttctttggtcactggcagcacgcccatcagttcatcattgagataaacctttaactgcgactggacaggcagtaacgatggcgatggggtgtattcgaggttgagcatcgccttcgtcaccacttcatcgctgcgcataccaaactcaatgctgccgttcgggttaatgccacgtagcaccatgctgcccggcggcggtgcaatttgcgcaaaggtcagcttcacatcacgcgaaggaccgttctgcgccacgactggcgcatcagcgccctgcacgcccggcatcacttgccccacctgcggattttgttccgtctgggcggctacagctggctcagcattgatcagtggttgcgttgctggcgtcgcctgcgtcatgaaagaggggaacgcactcatccccatagccactgcacaaatccagaatagttttcttttcatcgcgttatcatcattgttgagccaaagcctgatccgatggttgtgccgtttcgctccgctccgggcggcgcggaataaacgatacaacccaggaaaccagagaagtcagcacacggaatatgcccttcaccgaagaaggcgcaaactccgccagatggcggtagccacggaagccgagcttcagaatatccagcagactttccagcggcttatcttccgggtagctgtcctgccagagcgcccatgtatccgcacgggcaaacgtacactgcacaaaatcgatatgttgctgggtggtgagcggcattaatttcagcccaacttcattacccatcacgcgcgccacctgggtcgggaagacgtattcctgctgaccgcgtttaagcaacagattcactttctgcccttccagaatctgcgcctgaccgttgatcttgatccccaaaccaccgtcggagaaatcctgaacggtacacgagaagaggtgaccatcttcgcgggcaattgccgcgggcatcgtcatctccacgcggtgcgatcggcgtacctgtttgctttctaccgataccgcaactgcgccgccaagaacaatcaggttgtagaacacccacaccatactgacgaccacggtgagcatctcggttggcgggccatagaagtagcgccagatgcctaccgcaacgcccaccaggttgagcaggacaaggaagatgtagggccgcgagatcacccagtcgacgtactcttcttccaccagtccacctttggcggtgacgttaaatttgcctttgtgcgggttaatcagcgccaccagcgtcggtggtgcgatataccacgccagcaccgtttcgtagatttcactccagaaagagtggcgatatttgccctggatcttggagttggtcaggctggcatggatcatatgcggcagcacgaatagggcgatcatcaacgctggcgcatagatgatgtaggcatgaagcagcaggaacgccagcggcgcagtcaggaagatcagccgtggaatgcccgacaagaagtggaacatggcgttgacgtaacatagccgctgagcaaacttcagccctttaccggtgagcgggttatcgagacggaagatttgtaccatcccgcgcgcccagcgaatacgctgaccgatatgcgccgacagactttcggtcgccagccccgccgcctgcggaatacgcatatacgcggaggtatagccacgacggtgcaaccgcagagaagtatgcgcatcttcagtcacggtttcgacagcaatgccgccaatttcatccagcggcttacgacgaatcaccgcacaggaaccgcagaagaaagtggcgtcccacatatcgttgccatcctgcaccagaccatagaacagcgtgccttcgttcggcgttttacggaaacgccccaggttgcgttcaaacgggtccggtgagaagaagtggtgcggcgtctgcatcatcgccagctgtttttctttcaggaaccagcccatggtcatttgcaagaacgatcgcgttggtacgtggtcgcagtcgaaaatcgacacgaactcgcctttggcatatttcagcgcattgttgatgttgcctgctttcgcatgttcatgagtggtgcgggcgatatatttcacccccacgttttgcgcaaactggcgaaactcttccctgccgccgtcatcaaggatccagatattcagcttatctttcggccagtcgatacccagcgaggcgtaaatggtatttttcaccacgttgagatcttcgttgtaagtcgggacaaagatatccaccgacggccacagcgacatatctttcggcaatggcaccggctgacgattcagcggccatactacctggaagtagccgagcaccagcacaatccacgcgtacgtttcagcgaagagcagaataagcccgcacaccaggctgaccggatcgtcccagttcagcgtagaggtgtaacgccaccagatataacggcaagaaacggtcagcgacagcacaatcaacattagcgccgagaagcgccccggcatccgccgtacgatcagcgctaccccccacagcagcatcaggaagataaactgcgccagcgggttaaacggctgagtaacgcagattaacgccagaatcagcgagaaggtgacgatgataccgaggatcaaccgccgcgccccggcactcaaatgaccgagctcttttttctcatccagatgctgtgttttatggctaacgcgctcaggcagctcgttcatccattgatggtaacgtccacgaatattttgcagacctgaaaatgcccgcctgcgcggtttcggcgtttctttgcgcgatgcaccgatcaataaccagcatgtttgaatgagataacggaccgggtccagcggacgcggacgcgaggcgttgatatgcggatacaggtttttatgttctgcgcgaatacgctgccagcgcgggtgctccagcggaataaaaatccaggccaggatcatccagaaacagccgagcgtcgcgctgaaagccgacgcaccgtgacgacgataatcgcgataacgcccgataagccgcgcgttgaccggcgggataagcaaccaccgggtcaggatactcatgatgcactcccgactggcgttttcagcccggagtagttcaacaggcaccagttcgccagcgtcagtatctcttcagccgccagcgcatcactgcgatattcacctactggttgcttagccgccaggcattcagccatcgcttcatcacgatgaatgagcatcggcagtaatcggcgctggctttgcaaccaaagctggtaaatatcgtcctgaacctgactgccaatacggaagtcattaatcaaaatatgtgcgccatccggcagcgcttgctgatgcagtcggatatggcagttggcatccacattgacgattgccagcgagtgatcgcacaaactcagcagctggtgggttatctgcgaggcatcacgcggtaagtcgattaaaatccactggtaacgcccgctggcttttagttgctgtaagccggagcaaatatcgctcagccgggtttgccagtgctgtggattttcttgttcttcaatggataactgaccaaaaggcagcaaatcgagctgcgaggtgtagcgcaacccagcgtcacgccagtcctggccatccagcatcgctctggcccagccctgacggtgggtaaaatcaacattaaatgacaggcgcaacaagttgtccgggcaggcatcgaccaccaggacattttctcccaacatttgtaatgaccaggctaatgcggcggtgatggttgttgtccccacgcctccccgcaccccctgctatcccagtacggccattcaccaatcccctacttttgttgcgcaaactctgccagcaacggccagcgttttaatgccgcggccaactgttcgcgttgggaaatatcggcataatcaatatcaggcagtgaaaatgcctgctttaacgccacaatatcattctggaagatatagcctatcgcgggatcaggcagagtatctggttcattgttattcattttgcttgatccctatgaaataaccgtaccgttcatgagacaattctaaccgtgagcatttcgccggtttattgtttacggcgagacgggaatttgctcactttttgactttccgttacgcaacagaaaaagttaaaaacgaaaagactaaaatcacacgtcttgtgaccttctaaattgattcacatgctaaatctgataagttttaatttcaatggtaggtttatttcttagctttcgctagtaaactgataatcagacaaaatggtgacatgagggacattgtggaccctgtattctctatcggtatctcatcattatgggatgagctgcgacatatgccagcaggcggcgtctggtggtttaacgtcgatcgccatgaagatgctatcagtctggcgaatcaaacaattgcatcccaggctgaaaccgcacacgtcgcggtcattagcatggacagcgatccggcgaaaatctttcaattagatgattctcaagggccggaaaaaataaaattattttcaatgctaaatcatgaaaaaggtctatactatttgacccgtgatttgcagtgttctattgatccccataattacctttttattcttgtttgcgcaaataacgcatggcaaaacattcctgccgagcggcttcgctcatggttggataaaatgaataaatggagcaggttaaaccattgttcgcttttggtaattaatcccgaaaataataacgataaacaattttcattgttgcttgaggaataccgttcactttttggtcttgccagtttgcgttttcagggtgaccaacatttgctggatattgccttctggtgcaacgaaaaaggggtcagcgcccgtcagcagcttagcgttcagcaacaaaatggtatctggacattagttcaaagcgaagaggcggagatccaaccacgcagcgacgaaaaacgcattctgagtaatgttgctgtactggaaggtgcgccgccgctatcggaacactggcaactgttcaacaataacgaagtcctgttcaatgaagcccgtaccgctcaggcggcgacggtggtcttttctttacagcaaaatgcgcaaatcgagccactggcccgcagcattcataccctgcgtcgccagcgcggtagtgcgatgaaaatcctcgtgcgggaaaataccgctagcctgcgcgccaccgatgaacgtttgttattggcctgcggtgcaaatatggttattccgtggaatgcgccactctcccgttgtctgacgatgatcgaaagcgtgcaagggcagaagtttagtcgctatgtgccggaagatatcactaccttgctgtcaatgacccagccgctcaaactgcgtggtttccagaagtgggatgtgttctgtaatgccgtcaacaacatgatgaataaccctctattacctgcccacggtaaaggcgttctggttgccctacgtccggtaccgggtatccgcgttgaacaagccctgacgctgtgtcgccctaaccgtaccggcgatatcatgaccattggcggtaatcggctggtgctgtttctctcattctgtcggattaacgatctggataccgcgttgaatcatattttcccattgcctactggcgacattttctcaaaccgtatggtctggtttgaagatgatcaaatcagtgccgagctggtgcagatgcgcttgcttgccccagaacaatggggcatgccgctgcctttaacgcaaagttctaaaccggtcatcaatgccgagcacgatggtcgccactggcgacgaataccagaacccatgcgactgttagatgatgctgtggagcgctcatcatgatgaccatcagcgatatcattgaaattattgtcgtttgcgcactgatatttttcccgctgggctatctggcgcggcactctttgcgacgcattcgcgacaccttacgtttgttctttgctaaacctcgttatgttaaaccggccgggacgttacgccgcacggaaaaagccagggcaaccaaaaaatgactcaatttacgcaaaataccgccatgccttcttccctctggcaatactggcgcggcctttccggctggaacttctattttctggttaagttcggcctgttgtgggcgggatatcttaacttccatccgctcctcaatttggtgtttgccgcgtttctgctgatgccccttccgcgctacagcctgcatcgcttgcgccactggattgccctgccgatcggctttgctttgttctggcatgacacctggttgcctggcccggaaagcataatgagccagggttcgcaggtggcggggttcagtaccgattatttaatcgaccttgtcacacgctttattaactggcagatgattggggccatttttgttttattagtggcctggttattcctgtcacaatggattcgcattaccgtttttgtggttgccatactgctatggctgaacgtacttaccctggcgggaccaagtttctccttgtggccagccggacaaccgacgaccactgtaacaacgacgggtggtaacgcagcggcaaccgttgcggcgacgggtggcgcaccggtagtgggtgatatgcccgcacaaactgcaccgccaacaacggcgaaccttaacgcctggctgaataatttctataacgcggaggcgaaacgtaaatcgaccttcccgtcttcgctgcccgctgatgctcagccatttgaactactggtgattaacatctgttcgctttcctggtcggatatagaagccgccgggttgatgtcgcatccactgtggtcgcatttcgatattgagttcaagaactttaactccgccacctcctacagtggcccggcggcgatccgtttactgcgcgccagctgcgggcagacttcgcacactaatctgtatcaaccggcaaataacgactgctatctgtttgataacctttcgaaactgggctttacccagcacctgatgatgggacataacggccagttcggcggttttttgaaagaagttcgcgaaaatggcggcatgcagagcgaattgatggatcaaacaaatctgccggttattttgctgggctttgatggttcgccggtttatgacgataccgctgtgcttaaccgctggctggacgttaccgaaaaagataaaaacagccgtagtgccacgttctacaacacgcttccactgcatgacggcaaccattatccgggggtcagcaaaacagcggattacaaagcgcgggcgcagaaattctttgatgaactggacgccttctttactgaacttgagaaatcgggtcgtaaagtgatggtggtcgtggtgccggaacacggcggcgcgctgaagggcgacagaatgcaggtatctggcctacgtgatatccctagcccgtctatcaccgacgtccccgttggggtgaaattcttcggcatgaaggcaccgcatcagggggcaccgattgtcatcgaacaaccgagcagcttcctggctatctccgatctggtggttcgcgttctcgatggcaagattttcaccgaagacaatgttgactggaaaaaactcaccagtgggttgccacaaacagcaccggtctccgagaactcaaatgcagtagttattcaataccaggataaaccgtacgttcgcctgaacggcggcgactgggtgccttacccgcagtaagaacgaaaaaggccgcagagtttcccccctgcggcctggtccgggcgcaaattgccattacggcagcctgacgcccgcatgacacgttacttccgcttgttcagccagttcacgatcatactggcaagaatgccagcaatgaccggagccgctaaatcatgccagaaggccatgcccagctctgcgaacgtcatatagccgcctgtgttgtaatgacaacgtttcgcggctattcttgagtggtctagagtcaagattagcccccgtggtgttgtcaggtgcatacctgcaacgtgcgggggttttctctctccagcaaccaatgccaccagggataaagcccccgcaacattgcgcctcaccggaacctttccggcttgccgctgattctacgattgctttttactgtcagcacccggcaatcttcctcattgcgcgatgccttccagcttaatttctttatttgcaatagttgcagttcatatccgggctgactccagactggtagtgaaatgcgcaattttgtagaattgcgcctcctcgcgacctccccagtgaatctgttgcctcattttttacatactgcgtattcgacttctccacctgttgcgcaagagaaactgggtttattcatttttgcgaggccgacttctttctggacaggactttatgcagcacaacacactatcgaaacacaatcagaaattgccgtttacacgctacgacttcggctgggttttattatgcataggcatggcgattggtgccggaaccgtgctgatgccagtacaaattggcttgaagggaatttgggtatttattaccgcagcgatcattgcttatcctgccacctgggtagtgcaggacatttatttaaaaaccctttctgaaagcgattcctgtaatgactacaccgatattatcagtcattacctggggaagaactggggaattttcctcggggttatctactttttgatgattatccacgggatttttatctactctctctccgtggttttcgacagcgcctcgtacctgaaaaccttcggtttaaccgatgccgatctttcacaatctctactttataaagtcgctattttcgccgtactggtggcgattgcgtctggtggtgaacgattactgtttaagatttccgggccaatggtggtggtcaaagtagggattattgtcgtgttcggttttgcgatgatcccgcactggaatttcgccaatataaccgccttcccgcaagcctccgtctttttccgcgatgtcttgcttaccattccattttgcttcttttctgcagtatttattcaggtacttaacccaatgaatattgcctatcgtaaacgggaagcggataaagtactggcaacccggctcgcgctgcgtacccaccgaattagttatatcacgctcatcgcggtgatcctgttttttgccttttcgtttaccttctcaattagccacgaagaagccgtttctgcctttgaacaaaatatctcagcactggcgctggccgcgcaggtgatccctgggcatatcattcatatcacctctacggtgcttaatatctttgccgtactgaccgcattctttggcatttatctcggtttccacgaggccattaaaggcattattctcaatctgttaagccgaattattgataccaagaaaattaactcacgcgtgctgactctggcgatctgcgcttttatcgtcattacgttgacgatttgggtttcgtttcgtgtatcggtgctggtgttctttcagttgggaagcccgttatatggtattgtgtcgtgcctcattccgtttttcctgatctataaagtcgcacaactggaaaaacttcgcggatttaaagcctggctgattctgctgtacggcattttgctatgcttgtcgccactgttgaagctgattgagtaaaccggagcgcatggccccggttttgtgagttaacgctgcggattttcatcctgatcaacagcaaaacaagctaccagttgaccgccgtagtcttttagctgcggctgcaactgggtgcaggggccgaagcgccgacgacagcgggcgttgaaggcgcaacccggcggtggattcagtgggcttggtagttcaccgctgagcttgatgcgctcgcggcgatcgtccgggttcaggcgcggcgtcgcggaaagtagcgcctgagtgtacggatggcgcgggttattgaagatttggtctttcgttcccttctccacgcagcggcccaggtacatcaccatcacttcatcagcaatgtgctccaccaccgacaggtcgtgggagataaagacataagacagccccaactcctgctgcaaatccatcatcagattcagcacctgcgcgcgcactgaaacatccagcgcggaaaccggttcatcggcaatcaccacatccgggtcgagcatcagaccacgggcgatggcgatacgctgacgctgaccgccggagaacatatgcggatagcggtcatagtgctcggttttcaggccgactttcgccatcatcgacagggctttttcccgacgctgttctttgcttaagctggtgttgatcagcagcggctcttcaagaatttgcccgacttttttacgcggattcagcgaaccgtaagggttctggaagacgatctggattttctgccgacgcagcttctgcgcctgcggatcgtgcttaagcagatcctgcccctggtaatacagctcgccaccggtgggcatttcaatcatcgtcagcaaccgaccgagggtcgatttaccgcagccagattcgcccactactgccagcgttttgccacgttcaaggttaaacgaaacgccatccagcgctttaaccagacgttccggcgcgaacatgcctttcttcaccggataatgttttttcaggtcgatagcctgcaacagcggttgttgcagggtggcctcttgcgtactcatagtgtcggcctcccggcatcatcaagtgggtaatggcatttggactgacgcccgtcagcgagcatattcagcgccggttcttcagcgcgacatctgtcagtggcataggggcagcgcgggttaagcaggcagccgttcgggcggtcgtacttgccgggaacgacacctggcaacgacgccagacgttctttgtcctgagcaaattctggcagcgcacgcagcaatgcctgagtatacgggtgacgcggcgcatggaagatggcgtgcgcatcaccggtttccaccacctggcctgcatacatcacgatgattttatgtgccgcttccgccaccagcgccaggtcatgggtaattaacaccagcgccatgttctctttctgctgtagctccagcagtagttcgatgatttgcgcctgaatggtcacgtccagcgcggtggtcggttcatcggcaatcagcagttttggccgacaggcaatcgccatggcgatcatcacgcgctggctcatgccgccggaaagctgatgcgggtaaacatccagacgcgatgccggatcgggaataccgacctgattcagcaggtcaatcgctcgctgacggcgggtacttttgttgccgccctgatgcaccttaatcgcttccataatctggaaacccacggtgtagcacgggttaaggctggtcatcgggtcctggaagatcatcgccacttcggcacccaccaggttgcggcgctctttttctgagatacgctgcaaatcctggccgttaaactccagtttttctgccattacgcggcccggataatcaatcagccccataatcgccagtgaactgaccgacttaccggagccggactcacccacaatcccgaccacttcgccctgttttacgctgtagctgatgcggtctacggcgcggaacggcgcgctttcgtcgccgaaatgcaccgataatttatctacatttaataacgccatctcgaacctcttactgcttcagtttgggatcgagcgcgtcacgcagaccgtcacccatcaggttaaatgccagcaccgtcagcaggatcgccagacccgggaaggtcacgacccaccaggcgctttgcgcgaactgcaacacgtcggagagcatggtgccccactcaggcgttggcggctgtgcccccatgccgaggaaaccaagagcagccatatcgagaatggcgttagagaaaccgagcgacgcctgaacaatcagcggcgcaaggcagttcgggaagatgttaataaacatctgacgcatcgccccggcacccgccacgcgagacgcggtgacgtaatcgcggttaacttccaccagcacggcggcgcgggttaagcgcacatagtgcggcaaggcaacgaaggtcagtgccagcgcggcgttaccaatcgacgggccgaaaattgccaccagcaccagcgccagcagcagacttggcagcgccagcatgatatcgaccacgcgcataatgatgttatcgaccaggccgccaaagtaaccggcgatcaggccgagaataacgcccataatcagcgataacacaactaccagacagccaaccagcagcgacaggcgcgcaccgtacatcaggcgcgacagcacatcacggcctacgtcatcggtgcccagcaagtgcgccatgctgccgccttcctgccaggctggcggggcgagcagtgcatcgcggaactgttccgccgggttatagggtgcaatccagttggcaaagatcgcgatgaacagcacgatgacgacgtaaaccagcccgacgaccgcgcctttgttgcgtttaaaatagtgccagaactcctgtaacggggtcatcggcaccggtgcgctaatcactttattttcagtaacctgtgacatgatgtccccttacttcttatgacgaatacgcgggttcaccacgccgtacagcagatcgaccagcaagttgacgaggataatcatcgtcgccaccagcaatacgccgccctgcactaccggatagtcgcggcgttgcagtgcgtcaatcaaccagcgtcccagaccgggccacgagaagatggtttcggtcagaatcgcccccgccagcaatgttcccacctgcaggccgataacggtcaccaccggcagcatcgcgttacgcagcgcatggacgataatcacccgcatgcgggttagccctttggcgcgcgcggtgcggatgtaatcctcgcccagcacttccagcatcgaggagcgtgtcatacgcacaatgaccgccagcggaatagtacccagcacaatggcaggcaagatcatatgggcgacggcatcgataaagttgccgtcttcaccccagatggcggtgtcgattagcataaaaccggttaacggattggagtcatcgaggaacaccatatcgctcacgcgaccggagacgggcgtcaggttccagtgcaccgaaaccagcatgatcagcatcatgccccaccagaagataggcattgaataacctgtcagcgccaggccaaccgctgtgtgatcgaaaatggaaccgcgtttaaccgcagccagcacgccgaccggaataccgactgccgtagcaaaaatcatcgcgcagacgccaagttccagcgtggcctggaagcgcggcacgaactcttcccaaaccgggatgcggcttttcattgaaatgcctagatcgccatgcataacgccccaaatgtaatggagatactgctgccacatcggtttatctaagccgagttcagccagcagctgcgcgtgacgctctggggagatcccacgttcgcccgccatgatcatcaccggatcgcccgggatcatgtggacaaaggcaaatgtgagaagggtaataccgataaacgtggggatgacgagtcccaaacgtcggagaataaactgcaacataacccggattctctatagtgacccgcagcctggaactgcgtgtctgtattgctcacaaatcaattcccgcccttatcggacagggaatgaagtattgctgccggatggcgctgcacgcagaggcacagcgccaccgggtatacagattgttgacaaagtgcgctttgtttatgccggatgcggcgttaacgccttatccggcctacaaaatcgtgcaaattcaatacattgcagaattttcgtaggcctgataagcggagcgcatcaggcatttttgcctttgccatcagtcttgtatggcttttaattattcgatagagacgttttcgaagtgatgtttgcctaatggatcaaccacatagcctttaacttctttacgtaccggttcaaacacggtggagtgagcgatgatcagtgccggagcctgatcgtgcatcaccacctgcgcttgtttgtacagttcaacgcgtttattgtggtcgtcggtagcacgcgccggttgaatcagatcttcaaacggtttgtagcaccattttgagtagttggagccttgttcagaggcggcgcagctgaacagggtggcgaagaagttatccggatccccgttatcgccagtccagcccatcattaccgtctggtgctcgccatctttcgcacgcttgaggtactcaccccattcgtaggtgacaattttggcctgcacgccgactttcgcccagtctgcctgaatcatctccgccatgcggcgagcgttcgggttatacggacgttgtaccggcatcgcccacaggtcgatggagaaacctttttccagacccgcttctttcagcaaggctttcgctttttcaggatcgtaggtgtagtcctgaacgtcgtcgttatagccccacatggttggcgggatcaggtttttcgctgatacgcccgcgccctgataaaccgctttgatgatcgcgtctttgttcaccgcgtaggtcagagcctggcgaactttcacgtcatcgagtggttttttctgcacgttatacgagagataaccgacgttcagccccggcatttccatcagattgatggatttatcctgcttcatgcgagcgatatctgccgggttcgggtacggcatcacctggcattcattcttctgcaatttcgcgtaacgcacggaagcgtcaggggtaatagagaaaaccagcgtatcgatctgcggtttggtgccccagtagccatcaaacgctttgtagcggatacgggaatctttttgatactgctgtaactggaacggaccggttccgattgggttgaggtccagtttttccggtgtaccggctttcatcatcgcatcagcatattcttttgacagaatagaggcgaagtccattgccaggtcagcgaggaacggcgcttccgggcgagtcagcacaaactgaacggtgttgtcgtccacctttttcacttcactgatcagctctggcaagcccatgccttcgaagtattcgtagctgccgccagaaactttatggtacgggttttgcgcgtttttctgacgatcgaacgagaacaccacatcatcggcgttcagttcacgcgtcggtttgaattctttattgtcgtgccacttcacacctttacgcagatggaaggtataggttttaccgtcttcgctgacttcccacttttcagcgaggcccgggatcacttcggtggtgccgattttaaattcaaccagacggttataaagcgggacggaagaggcgtcataggtggtgccggaggtaaacagctgcgggttaaacccttccggagatccttctgagcaataaaccagagttttagcctgaacacttgctgcgacggtcatagccaccaggctgagaccaagcttcagcatccctgactttttcaaggaaatacgcattattctgctccaattgtgatgtttgttgttttaaccctttgcagtgggttgtcgctgcctgaccttttttgttttttgcccggtcgggtcaacgttatgaggtggggatgccgtactaattaacatcagtgtaacagtgcggatcctccataaaatgcccctcgtgacctacaatctgtcaacagaatgtgaaaacgtcaatacagccaaccgggatttacaccaacggtgagaatccacaaacaaagattaaaaaaacttcaaacagctatttgcagcagagaaatttgtgctactccaacatgaccagaacaatcagcttaatatttagcaacatttggtgattaagttttatgcatttaatgaaaaaaatctgaggaaaaggtggatatctgagcgattaataccatgaacgctaaaacgcacagcggaaaatgccagggccagccataagtaacgcaaaaaaagatttaagcaaatataaaaaaagacaatggtttctgtcacaaatccgttaatggatagtgagatatggggcgcaaatttggcagggaaatgtgtgtcgtgtaggtcgaataaggcggtcgcgccgcatccgacaatggccggcacatttgcctgatgcgacgctgacgcgtcttatcaggcctacgtcgagtcgaacctccctgcccccggaggttctcatcctcatgagctgcagatgcaaaaaagcctgctcgttgagcaggcttttcgaatttggtcggtgatagaggattcgaacctccgaccccttcgtcccgaacgaagtgcgctaccaggctgcgccaatcaccgaatgcggggcgcatcttactgcgcagatacgccctcgtcaatcccttaatagcaaaatgccttttgatcggcgagaaagtcagcaggccgcttagttagccgctgcctcttttgcctgcgggatgtgacaccagttgttgttttcgttaattccaccatccggtgaagtatagccaagacaacccatgatggtatcgtacagctctacgtgacggcgtggcactttcatgtcggcttcttttttcagctgcgcaaacgcctgcgcattggccggattttccagatatttatctgacatccagaccatcatcggtacgcggaactgctccggcggtgccagttcacgcggcgtgccgtgcaggtgctcgcgttcattaattgactcaccgtggtcagctgcgtagaacacaatcgctttcttatcgcgaacctgatcaatcacgctggagataaagtgatccacataggtcaccgagttgtcataggagttgatcatctgcgctttggtacagccgctatcaacaccaatacattccggcttccactgcgcgaagctacgcggataacgctgggtgtagttaaaatgcgaacctttggtatgcagaatgatcagatgcttaccatccgggttgcgccctagcgattgctgcatttcgtctaccagcaacatatcatctaccggcttgccacgattacgtggctccgcaccaatctgctcacgataagcaatgttgtccgccatcgtgttgctgtagaaccacatttcgctctgcatagcgtagaggtcagaactgaatcctaactgcttcagaaccgcgaaaatgttctgttcttttaatgtgcgctgcggattatcttccgcgcccccctgacgtacaaacatgcaacgcagtgagagtttggttgcggtatcacaggagtaaccacggaacgccgccagatttttctcctgggccagtttcggcgtggtattacgctcatagccgaaaatacccatatggtcccaacgcgtggtttcaccgatgataaacacgacataagtgtcatcaacgttttgcggtgcctgataagtgaatttcttcgccggattaagcaatgaattattatcggaagattcatcgacccgcgcccaggcatacagccccaacgcagaaagccagtttgatggcagataagagttcgctacgacaccgccataactcggcaaatcaacgccggtcgccctctccactttcttctgctggatatccagcaaacgaatcggtgcccaaaccataatacccgccagtacgacgaccgccaggctgcgaatacgctgccctggggttcgcagttgtcggagcaaggtgtagcgacagcggttattccagataaggataagaggcaatgcactaacggcgattaaccagagaataaagttcagaccaacaacttcttttgacaggtcgatatcggtggtcatgacggaagcgatgatgccataaccaatgaccacattaaggaaggtcatgtaatagctggcacctgcggaaaagagcaccaccagcgatgccagaatacgccagctgcggcggccaaacagcgaaagaagacgtagtaaaaagaaggtcaccagtacggtggcggccagttcaacaacagcagaaatgcctttccagacggtaaaatcgtgcgcatagctgccgaagcggcggtaaaaaaccgcgccattcataaaaaggccaatatagattgcaagcaaaaagctcagcttctgctgtgtaatcgatttgatgtatctcatgcaaacaaaccctggacaaacaggtgataacaccctgcttagtggcttttcaggcccggcagggaaaaagtgcggaggtagtcagataagtaaaatctacacgcgcgaataagtagaccacagcaaagggaaaaagtgtggggaaagagtgtgcatgaagcacaaatttacaaaaatgcaagtttgaaaagagactttagcgttacaaaaagcagtaaaaagggccagttaattggcccaaattttacgagtcattgtttatacatttcgttgatgcgtttgatgcacacggaagctgaagcccagtagctcgcggctgagcattaaagggagccatgcgcctcacgcaacattttctgctctggctgacgaatcgtcgtagaaagcgccaatgacagaatcagcagggcgaaaatcacgtagaaggtcacatagaagccgccaaacagtgaggcgataatcgaaccacaaatgctaccgataccgaaaccgagataaatcacaccgtagtttttcgccaggttattgaggccaaagaactcactgaccagtgacggaaagacggtaatagtgccgccaaagttaaatgccacgcaggcaatcgctgcaaagaacgtcactgcattcaatggtgcaaacagcagggccgccatacccaccagcgatatcacctgaccaatggtaataacacggatacgggcgattttgtcagacagaatacccagcaccagacgacctgaaaggttggcgatggaaataacagtgactgcattggctgcggaaaccacatcaaggtgtgccagactttgggcgatatctttcgctaccccaatcacgtacaggccgctcatgcaggcggtcaggaacattaccgctaacatccagtactgcggtttacgcatcgactctgccagcgtgtaatctttctccaccacaccattgctggttttcacttcctgttttggtgcgtctttcattaacgttgcgccgaaaacaatcatcaacagcgcaatcgctccccaaatcacaaaggttttttccagaccgaccgtttccagcagctgcgtgtcgataaatttgaaacccaggctacccagaccataagaaccgatagcgaacgcggagatcagacctttacgctccgggaaccacttcacacagttagagagcgtcagcagataacccgcgccatctgccagtcccaccagcacaccggcgcttaaccacagcatcatcaggttgtcagaatgcgctgtcaggaagaagcctaatcccagcaaaatgccggaagccatggtgacgcgtttaacgccaaaacgttcctgtaatttgcccgcaacagaagacgaaattgccagccccagacttaacaagccgaaagagaaagcgacctggcttaccggcgcatccagcttggcggaaagcgcgccattaaacaggctccaggtataaaccgaccccagcgcaaactgggtaatgatagtaccgatgagtgtcagccagcgggtacgctgataatttgaaggtgtcatggcagtattcctgcagtaataaaaaggaaaaatctctgccgacaaccataacgaagtgcactttatgcctggggaaaaacggcatgaaatgccatcagaacggaatgaaatgccttagttcaggaatgaatgacgcgacaattattcaccaaatttattatttggtaagttagcacccactatcgccacaactattgttatttaatggtttcaattgtgactgttacgttaaaatctggcgctaacccccatcgtatacagatagtcgctattattagtggtattttctgcctgagttagcgcggcataggcggcaatattttgattgagcaacatatcagcgcctacggtgacatccagccagttgccgttctggtttgtcgccgtcatccggctcaggcctgattgcgccttccagatattctcgccaaattgctggttatagctgatttgcgcccagggtcggagatcgccaagccgggagtcaacacgccagcctaaggtactcacgctggcatgccataacggatcggtcagcgtggtagtactgtcgccaaactcgttatacatcgaggtggttgtgccatcgtaatgtaatgccgcgaccgggccggttgtaacctgttcatataaaggaaaattccagcccatactcatactgctggtcacatccacaggggtttcttccgccagattgacttccagtcccagcgccctttggctactttgaatacgttgcgacaaaatatcgttgtaatcaggttgatgatcactatcccaggtgtaacgctctgtggaaagtccgggttgcgtatcaacgatatattcttgttgccaggcgtaagctgtgttgagaaaaaaggcactgattaccacgctcgccagcaggcttagctgccagcgaccaccgcttttttttatgatcattaacacgactccagggaagagccgaattcggcaatattattgtcattgtatgaaggatatcgggcatagtagccctgtattaaatattgactttttcaccgatgcgtcaagaaaagcggctgaaatttttacgatcgggtacatagcgagggaaagtatggaacgttgcggctgggtgagtcaggacccgctttatattgcctaccatgataatgagtggggcgtgcctgaaactgacagtaaaaaactgttcgaaatgatctgccttgaagggcagcaggctggattatcgtggatcaccgtcctcaaaaaacgcgaaaactatcgcgcctgctttcatcagttcgatccggtgaaggtcgcagcaatgcaggaagaggatgtcgaaagactggtacaggacgccgggattatccgccatcgagggaaaattcaggcaattattggtaatgcgcgggcgtacctgcaaatggaacagaacggcgaaccgtttgtcgactttgtctggtcgtttgtaaatcatcagccacaggtgacacaagccacaacgttgagcgaaattcccacatctacgtccgcctccgacgccctatctaaggcactgaaaaaacgtggttttaagtttgtcggcaccacaatctgttactcctttatgcaggcatgtgggctggtgaatgatcatgtggttggctgctgttgctatccgggaaataaaccatgattcgggaagcgcaacgttcagaactccccgcgatcctcgaactgtggctggaaagtacaacctgggggcatccctttataaaagcgaattactggcgtgactgcattccgctggtgcgggatgcctatcttgccaacgcgcaaaactgggtctgggaagaagacggtaagcttctcggttttgtcagcattatggaaggccgatttctggcagcgatgtttgtcgcaccgaaggccgtcaggcgcggtattggtaaggcgctgatgcagtatgtgcagcagcgccatccccacctgatgctggaggtttatcaaaaaaatcaaccggcgataaatttttaccaggcacagggttttcacattgtcgattgcgcatggcaggatgaaacccaactacccacatggattatgagctggccggtggttcaaacgctgtaagtgtcagttccggaccgttgtatttttccagccatgccagcgccgtattacccgcacagccattccccagccgcgagctggggagatctttggtcagcacgttcactgcgccgtttttacaaataccgtcagcggttaaatccagatccggccatgccccttcgtgaatgcaaatcacgccaggtttaattccctcgctaatgaccgctccggcaagaatttgcccgcgtgcgttccacaaccgaacagtatcgccatcttgtatgccgcgctcctgggcatcgtcaggatgaatggtgacaggctcacgatttgccaccgcgtacaattcgcgcagagaactgtaattcagctggctgtgcaggcggtgcgccggatgggcagaaagtacctgcaactgttctggttcggcattgccctgccattcgtccggctccagccacattggatgcccagggcaatccgggtaaccgtaatcggcaatacgctgtgagaagatttcaatcttgccgctggcggtttttaacggatgcgccagcggatcgcggcaaaaatcagcgaagcgaataaaccgctcgctgtccgggttttccggcatctcaattaactggttggcttgccagaactcagcaaatggcggcaattcaacctgctggcttgccccgcgctgtcgggcaacgttataaaacgtttccagccattgcagctcactttttccttccgtaaaacgtgcataaccgcccttctcccagcgttcacttaactcggcaaaaacatcaaaatcattacgcgcttcatagcgtggcggcaccacttgcttcatcggcaccagatgctgattactgtaatcaccggtcatggtgagatcattacgctcaaaagaggtagtcgcaggcagaacgatatccgcgtgttttgccgccgccgtccagaagcattcagagatcaccaccagctccggtttttgccaggcacggatcaggcgattggtatcctgatgatgagtaaagttggcaccgcccgcccaccagataaaacgaatatccgggaaatgtcggttcataccgttgtgttgatatgcgccaccagggttttccagtgcttcaacaatgcgggcaacagggattttatccaccgcatcgcagccacccggcaagctgccctgcatggaagagagcaccgcagaacgccgcgtggggttaccaccattggcaaaatggtaagaaagaccaaaaccgccgccgggtgtgccgatttgccccaacattgctgccagcgtgacgatcatccagtgtttttgctcaccaaactgttggcgctgcattccccagcctgccatcagcatggtggtattttggtggaaaatagccgccagctcgcggattttcgctgcgccaacaccacaaatctctgctgcccattcggcggttttcgctattccgtcactctcgcccagcaaataagaggcgaagacggcataacctgtggtgcaacgcgccagaaacgcttcgtcgtgccaaccattttccaccagcgtatgggcgatccccagcatcagcgcaacatcggtgcccatgtgcggtgccacccactccattttatcgccaaagaaatcgacggtttccgatcgcattggatcaatgcagatcagctttttcccgctgtcacgcagtgcagaaaagtaagaaagcccctgctcatcggatgcattccacgcaattttcagcgtattgagtgggttagcactccacagcaccacgacatcgctatgttccagcaccagcggccaactggtctgctgttgataaacttcactaccacccacgacatacggcatgatcgcctgtgccgcgccggtcgaataatcccccagatgcccggtataaccgcctgccagcgccatatagcgttgtaataatgtcgaggccttatgcagcacgccgtttgaacgccagccgtaggaaccagcaaaaatcgatgccggaccataagcctcacgaatgcgtttatgttgttggtgaataagatccagcgcctcatcccaactcacgcgaacaaattcatcctgcccacgaatgccttgcgggttttccggtgacgcaagaaagccttttcgcaccattggaaatcgtacccgcgtattgctgtgaacctggtcgcgaaccgcgctctgcaaggagttttccattcctgtggctaacgcgccacgcgagctaaacacggtttcgccgtcggtttcaaccagcatgggcccccaatgggcggcagtcagaacggaatatcgtgaggatgagttggccaaaccgaagactcctgaaaggttagatgtattgagcagttaaatattacttacaaatttccgagtattcccaggaataatcttcatgttcacgcggcataatctcccgccacggaacccgtggcaaagaataaaaaggttattaaggattaacaatgaagaaacgtgtttatcttattgccgccgtagtgagtggcgctctggcggtatctggctgcacaactaacccttacaccggcgaacgcgaagcaggtaaatctgctatcggcgcaggtctgggctctctcgtgggcgcgggtattggtgcgctctcttcttcgaagaaagatcgcggtaaaggcgcgctgattggcgcagcagcaggcgcagctctgggcggcggcgttggttattacatggatgtgcaggaagcgaagctgcgcgacaaaatgcgcggcactggtgttagcgtaacccgcagcggggataacattatcctcaatatgccgaacaatgtgaccttcgacagcagcagcgcgaccctgaaaccggcgggcgctaacaccctgaccggcgtggcaatggtactgaaagagtatccgaaaacggcggttaacgtgattggttataccgacagcacgggtggtcacgacctgaacatgcgtctctcccagcaacgtgcggattccgttgccagcgcgttgatcacccagggcgtggacgccagccgcatccgtactcagggccttggcccggctaacccaatcgccagcaacagcaccgcagaaggtaaggcgcaaaaccgccgtgtagaaattaccttaagcccgctgtaatccctttcatgccaggtgatgcagaaatcacctggcattcttcagttttccttcatcatatttcaggctaaggtgatcgccttatcagtgaatggagagaagcatgaagccgtccgttatcctctacaaagccttacctgatgatttactgcaacgcctgcaagagcatttcaccgttcaccaggtggcaaacctcagcccacaaaccgtcgaacaaaatgcagcaatttttgccgaagctgaaggtttactgggttcaaacgagaatgtaaatgccgcattgctggaaaaaatgccgaaactgcgtgccacatcaacgatctccgtcggctatgacaattttgatgtcgatgcgcttaccgcccgaaaaattctgctgatgcacacgccaaccgtattaacagaaaccgtcgccgatacgctgatggcgctggtgttgtctaccgctcgtcgggttgtggaggtagcagaacgggtaaaagcaggcgaatggaccgcgagcataggcccggactggtacggcactgacgttcaccataaaacactgggcattgtcgggatgggacggatcggcatggcgctggcacaacgtgcgcactttggcttcaacatgcccatcctctataacgcgcgccgccaccataaagaagcagaagaacgcttcaacgcccgctactgcgatttggatactctgttacaagagtcagatttcgtttgcctgatcctgccgttaactgatgagacgcatcatctgtttggcgcagaacaattcgccaaaatgaaatcctccgccattttcattaatgccggacgtggcccggtggttgacgaaaatgcactgatcgcagcattgcagaaaggcgaaattcacgctgccgggctggatgtcttcgaacaagagccactgtccgtagattcgccgttgctctcaatggccaacgtcgtcgcagtaccgcatattggatctgccacccatgagacgcgttatggcatggccgcctgtgccgtggataatttgattgatgcgttacaaggaaaggttgagaagaactgtgtgaatccgcacgtcgcggactaagccgcgactgcgtagagtaaagcccgataatcgctcgggcttttactctttattgggttgcagtaactgctgtagtccaggcctgattaaacgcctgatgctgtgccggtaatggcgcaatcagtttgttatattcacttgcctgctgtgaagtcgggaactggatgccatttgcgacaaagctcacctgagtaccttgctgagcaatgtagtctccaaccatcaccagttgttgcgtgaaagtttgtgccgccggaatcaacggttgcaatgcatcagctggcgtcgttaccactttggtgaatgcctgatcaaagaccggtttcaaatcatcgctctgttttagcgcagagtgcgcagcatcggcctgcaacttcgcattttgcagttgttgcgccagcacacccagcgaaccgttcatttcacgcagcggaccgctttgcgtaacgtaatcctgcggtacgcgaattgcgttaacgctgtctacaaccgggcgcagaccggaatccatcgcctgattcacctgctgagaataaccatacagaatcgcgtaatcagagacaaaaggaccaaactgttttttctgatcggcagtcagggttggtagacgttcaccgctacgcatcactgtattctgcaggaagtcgataaacgctttacgctgatcgccttctttatcaaaacacccactcaggctaactaccattaataacgccgcaagaggcgcaaaccagcgagagcaggactttcctgtcgccattttcttactcctttcacccaaaaaaagcgcacaacgacacacgcgtgtctgacgtgacaaggatagtccaggacaggcttgcaggataccctttctacgtaatcttcctggtaaaatcatggagaaaatgaaacaaggttaatttgttgtttcattgttaaaaaatgatagtgccgttgccttttttgtagccagagatttacgccttcgcagaaggttagattttcgaaatctttacaaaacaggagtggtaagagatatatcggcatttatcagatcgttaggtggctataagtcacgctaaatgacaggctgaatcgaatcatagccagagcatgccctgacttcaccccgctgtgtctgcttttcccgactattcttaatgagcttcgatgcaattcacgatcccgcagtgtgatttgaggagttttcaatggaatataaagatccaatgcatgagctgttgagcagcctggaacagattgtttttaaagatgaaacgcagaaaattaccctgacgcacagaacaacgtcctgtaccgaaattgagcagttacgaaaagggacaggattaaaaatcgatgatttcgcccgggttttgggcgtatcagtcgccatggtaaaggaatgggaatccagacgcgtgaagccttcaagtgccgaactaaaattgatgcgtttgattcaagccaacccggcattaagtaagcagttgatggaatagacttttatccactttattgctgtttacggtcctgatgacaggaccgttttccaaccgattaatcataaatatgaaaaataattgttgcatcacccgccaatgcgtggcttaatgcacatcaacggtttgacgtacagaccattaaagcagtgtagtaaggcaagtcccttcaagagttatcgttgatacccctcgtagtgcacattcctttaacgcttcaaaatctgtaaagcacgccatatcgccgaaaggcacacttaattattaaaggtaatacactatgtccggtaaaatgactggtatcgtaaaatggttcaacgctgacaaaggcttcggcttcatcactcctgacgatggctctaaagatgtgttcgtacacttctctgctatccagaacgatggttacaaatctctggacgaaggtcagaaagtgtccttcaccatcgaaagcggcgctaaaggcccggcagctggtaacgtaaccagcctgtaatctctgcttaaaagcacagaatctaagatccctgccatttggcggggatttttttatttgttttcaggaaataaataatcgatcgcgtaataaaatctattattatttttgtgaagaataaatttgggtgcaatgagaatgcgcaacgccgtaagtaaggcgggaataatttcccgccgaagactcttactctttcaatttgcaggctaaaaacgccgccagctcataactctcctgtttaatatgcaattcacacagtgaatctcttatcatccaggtgaaaaataaaagcgtgaaacaaatcactattaaagaaagtaatctatatttctgcggcattcccagcctcctgtgttgatttccaacgagtatgtactgcacccattttgttggacgatgaaatggaatagcccctaatatgtcaaagccaaaatacccttttgaaaagcgccttgaagtcgtgaatcactacttcacaactgatgatggttacaggatcatctcggcacgttttggtgtcccccgaacccaggtcaggacatgggttgccctctatgaaaaacatggagaaaaaggtttaattcccaaacctaaaggcgttagtgctgatccagagttgcgtattaaggtcgtgaaagctgtgatcgagcagcacatgtcccttaatcaggctgctgctcactttatgcttgctggtagtggttctgtagccaggtggctgaaggtctatgaagagcgcggagaagctggtttacgcgcgctcaagattggcaccaaaagaaacattgcaatatcagttgatccagaaaaagcggcatcagcattggagctgtcaaaagaccgacgcattgaggatcttgaaaggcaagttcgatttcttgaaacgcggcttatgtatctaaaaaagctgaaagccttagctcatcccacgaaaaagtgaaagtactcaacgagctaaggcagttttatcctcttgatgagcttctcagggctgcggagataccgcgcagtacgttttattatcatctaaaggctctcagcaagcctgacaagtatgcggacgttaaaaagcgtattagtgagatttatcacgagaatagaggccgatacggataccgtagggtaacgctgtctcttcatcgagaagggaaacagattaaccataaagctgttcagcgcctgatgggaaccctctcacttaaagcagcgattaaggtcaagcgataccgctcttacagaggagaggtagggcaaaccgcccctaatgttctccaaagagatttcaaggctacgcggccaaacgagaagtgggttaccgatgttactgaatttgcagtcaatgggcgcaagctgtatttgtctccagtaatagatctcttcaacaacgaagttatttcttacagcctttcggaaagaccagtgatgaacatggttgagaatatgctcgatcaggcattcaaaaagcttaatcctcacgagcatcctgttctgcactctgaccagggatggcagtatcgtatgagaagatatcaaaatatccttaaagaacatggtattaaacaaagcatgtccagaaaaggcaattgtctggataatgctgtggtggagtgtttctttggaaccttaaagtcggagtgtttttatcttgatgagttcagtaatataagcgaactgaaggatgctgttacggaatatattgaatactacaacagcagaagaattagcctgaaattaaaaggtctgactccaattgaatatcggaatcagacctatatgcctcgtgtttaactgtccaactttttggggtcagtacaaactttgatttatagtcaggtggggcttttctctgtctgcctttcggtgaatacctgagacaaacagtctcaagcacccgtggctattctagcttaataagtttgtttcttctccttgatataatcctaaaaaaatctcataaaattaatatatgagataatctttattcagcagaagattattaaaggttgctgtattatttagcgataaaaaaagcctgccagatggcaggctatttaataacggcgttattattgcaacagcgaaatatccgcaacgcgcaggaacagttcgcgcagtttctccagcatggtcagacggttgatacgcaattctttgtcatcaaccatgaccatcactttatcgaagaaagcatcaaccggttcacgcagctcagccagttcgaccagcgcatcctggtaacgaccttccgtaaagtacggctccagcttgtcacgtagcaccacaacctgcatcgccagtttaatttcttccggctctttcagggtagaggcattcacgcggtcgctcagcacttcgtcagatttcgccagaatgttagatacacgtttgttcgccgccgccagtgcagcagctgcatccagggtacggaaatgcgataccgctttcatacgggcatcgaaatcagccggacgagtcggacgacgcgccagtaccgcctggatggtgtcaacggtataaccttcgtcctgataccaggcgcggaagcgaccgagcataaagtcgataacatcatcaactacgttggcattagtcagcttatcgccatacagacgcaccgcttcttcggtcagcgtttgcagatcaaggttgaggttcttctcaacgataattcgcagcacgccaagcgcggcacgacgcagcgcaaacgggtctttgtcgcctttcggatgctgaccgataccgaagatacccgccagggtatccatcttgtcagcaatcgccagcgcacaagctactgggttggacggcaggtcatcaccagcaaaacgcggctgatactgctcattcagcgccaccgcgacatcttccgcttcgccatcgtgacgcgcatagtgcatccccataacgccctgggtgtcggtgaactcgaagaccatgttggtcatcaggtcgcacttagacagcagacccgcacgggtagcgtggttaacgtcagcgccaatctgttcagcaatccagccagccagcgcctggatgcggtcagttttgtcgcgcagcgtccccaactgttgctggaacaacacggtttgcaggcgcggcaggttatcttcaagacgttttttacggtcggtgttgaagaagaactcggcatccgccagacgcggacgaacgactttctcgttaccggagataatctgctgcggatctttcgattcgatgttggcaacgaagataaagttcggcagcagtttgccgtcgttcgcatacaccgggaagtatttctggtcacctttcatggtgtaaaccagcgcttcagccggcaccgcgaggaatttctcttcgaattttgcggtcagaacgaccggccactccaccagcgaagccacttcttccagcaggctttcgcttaagtcagcgttaccgccaatcttacgcgctgcttcttcggcatcggctttaatcttcgccttacgttcttcgtaatcggcgatgactttcccacgctcacgcagaatttccggatactgatcggcgttatcgatggtgaattccggctcgcccataaagcggtggccgcgaatcacgcgatcggactgaatgcccagaatggttgccggaatgactttgtcgcccagcagcagggtcacggtgtgcaccggacgcacgaagtgcacgtcgcttgcgccccaacgcatcagtttcgggatcggcagtttcgccagagaagtcgcaaccatattcggcagcagtgcttcggtgctttcgcccttcacatgggcgcgatacagcagccattcgcctttatcggtagtcagacgctcagcctggtcaacggtaataccgcaaccacgcgcccaaccttctgccgctttgctcggtttgccttcagcgtcgaacgcctgggcaatcgccgggccgcgtttttcgatttcacgatccggttgcgcttccgccaggttagctactttcagcgccagacgacgcggagcagcaaaccattgaacggtgccgtgtgcgaggccagcgttatccagctccgcagtaaagttcgcagcaaaggactcagccaggctgcgcagtgcttttggtggcagctcttcagtgccgatttccaccagaaaagttttctcagacatagccgcctcttacttatctttgttgcacatcgggaagccgagggcttcacgggaagcgtagtatgcttctgccactgctttggtcagggtgcgaatgcgcagaatgtagcgctgacgctcggtgacggagatggctttacgcgcatccagcaggttgaagctgtgggcggctttcagaatacgctcgtaggctggcagcggcagcggattttccagcgccagcagctgctgcgcttctttctcgtactgctcgaagcaggtgaacaggaagtccacatccgcgtattcgaagttgtaagtggactgctccacttcgttctgatggaacacgtcgccgtaggtggttttacccagcgggccgtcgctccagaccaggtcgtaaacgctgtctacgccctgaatgtacatggccagacgttccagaccgtaggtgatctcgccggtaaccggtttacactccagaccaccaacctgctggaagtaagtgaactgcgtcacttccatgccgttcagccacacttcccagcccagtccccaggcacccagcgtcgggttttcccagttatcttccacgaaacggatgtcgtgaatagtcgggtccatgcccagctctttcagagaaccgaggtacagctcctgaatattgtccggcgatggcttaatgaccacctggaactgatagtagtgctgtaaacggttggggttttcgccgtagcgaccatcggtcgggcgacgagaaggctgaacataagcagccgccatcggttctggccccagcgcgcgcagacaggtcattgggtgagaggttcccgcgccgacttccatgtccaatggttgaacaatggtgcagccctggcgagcccagtaatcctgtaaggtcaggatcaagccctggaaggtcctggtatcaaacttttgcatattatttcgtgctggatacgtgtggatttaaaggaagggatcagtatacccgctggatggaagatatacagtacgaaacgggaaaaagcagggcttaacgcatggaaagatgcaaaaaatggccatccgcgtcaaaagaacagacaaactgctctttacggaaggtataaccgcgcatttcatagcttccctggaactgttcgaaggcggtgacgtcgattttttgctcgccggtgttataacgttttgccgcctgatccttgcataacgcttccatattcaacgaacgcagaggatcaacctttacccgttgtgctttctgcacgggtgacggtatagaacaacccactagcaccataagcgccattgccggaaagaaagcgttcatcatcattaaattaccgtctggtttgcaggtgagtcttattatttatatcggtatagtggctgatatcttacgaatttccttaagcctctataagctgtagtgataaaactcagattattccagtgcgccaaccaaatgatttatcggtcagactttttttaaccagatacagagacacagatgcagcccaaaatttactggattgataacctgcgagggatagcgtgtttaatggtggtgatgattcacaccactacctggtatgtgaccaatgctcatagtgttagccccgtcacatgggatatcgccaatgttctgaattctgcctctcgtgtcagcgtgccgctatttttcatgatttccggctatctcttttttggcgaacgcagcgcccagccgcgccatttcttgcgtatcggcttatgtctgattttttatagcgcaatcgcactgctctacattgcgctgtttacctccatcaatatggagttagcgctgaaaaacctgctgcaaaagccagtgttttaccacttgtggtttttcttcgcgattgcggtgatttatctggtttcaccgctgattcaggtgaagaacgtcggcggaaaaatgttgctggtgctaatggcggtgattggcattatcgctaacccaaacacagtgccgcagaaaattgacggttttgaatggctgccaattaacttatatatcaatggcgatactttttactacattctgtatggcatgttgggccgcgctatagggatgatggacacacagcataaagcactgtcgtgggtgagcgccgcgctgtttgcgacgggggtttttattatctctcgcgggacattatatgaattgcagtggcgcggaaattttgccgatacctggtatctttactgtgggccgatggtttttatctgcgcaatcgcgctattgactctggttaaaaacacgctggatacgcgtaccattcgcggacttggcttaatctcccgccattcattgggtatatacggattccacgccttgattatccatgcgctgcgcacccggggaattgagcttaaaaattggccaatactggatattatttggatcttttgcgcgacgttggcagcgagtttgttactttctatgctggtacaacgaatcgacagaaacagattagtgagttaagtaaaagcccggtcacattggactgaccgggcttacgtgagttattcgctgtattcttcctgggtaacctgtgtttcttttggtgggtttattccggcatcacgaatatttttctgcaccgctactgcaccaaacaagcttaagaagaaagccagtccataaaaacctttttcgctgagtaataatgtcgcattccacagacctaccatcagtaatgcaacagagataataaagacagtcaggcaggtcatataataaatggaagtggtcggtatgccttcatacttgtcccgaacggtcttttgataagacgccgcagaaaacagtcctaataccagtacggcaaaataatatcctttttcatttaactgcatctctgcattccatagccctaacagataggtaacgataccaccaacgagagctatccatgacacaatactaaaggccggtgaataggttgatattttgttgtccatcacagtattcctttcattcctgaatatgtaagagctttatgttgctcatgccgagcgaaacaaacgcatttgaccaaacaagcagacaaaaaaggcgatgggatagatcaccatttcataagtattgataggtgcgtttaaaacaccgataaacaagagaccgatagtgattaacgcaactaactggcagatatgggtaaaaaaatcatccagttgcccgagtttttctgcgcgaagatatgcatagttgccaaaagttgctgtcattaacacgccaagaaaatagccttttccacttaacaatgggcatgagatccatagcccaaccagataaaccagcgccccgacaacaaataatagttttgccacagtctttgaggttttcataacgatctccatatctaccagcgatacattacgagtaaccaacgaaagacaaaactgaaaaatgccattaacaaatgattttcagaataaattcatactaaatattaattaattactgagatatatagatgtgaattatcccccacccggtcaggcaggggataacgtttacgccattaatggcagaagttgctgatagaggcgacggaacgtttctcgtcgtggctgataagcggcataacgctgcgcatctggtagatgcgactgttctaacggtagttgcggcaacaattcaatgagcgatttctctggattcgccgcgatctgcgccagccttgctgcgcccagtgctggccccacatccccccccgtacggtaatcgagctgctgaccgctgatatccgccagcatctgacgccagtactcactacgcgccccgcccccaatcaacgtaacactttgcggtttaataccgcaggcatgcacgacatccatgccatctgccagcgcataacccacgccttccagcactgctcgcgccagttcattggggccatgttgatgagtcaaaccaaagaaaacccccttcgcctggggattattgtgtggcgtacgctcgccggaaagataaggcagaaaccaaactggctcggcactttcatcagcctgttgagctgcagcgattaaagctgggacattgctcaggccggttaatttcgcggcccaatccagacacgacgctgcactcagcatcacagacattaaatgccaacgttgcggtagcgcatggcaaaagctatgtacggcgctttctggcttgcttaagaacccttcgctgacagcaaaatagacccccgacgtccccagcgataacattgcctgattagcatcaaccattcccacaccaactgcaccagctgcattgtcgccaccgcctgcgacaactggcaccgtcgccataccccacgctttcgcaacttcaggtaacaaagcaccagtaatttcgctgccttcgtataatgcgggcatctggtcacgagataagtcgcaagcctgcagcatgacgtcactccagtcacgctttgcgacatccagccacatggtgccagctgcgtcagacatatcgctggcaaactcccccgtcatacgcagacgcaagtaatctttcggtaataatactttgtcgatttgacggaatatctccggctcatgccgctgaacccatagcaatttaggcgcagtaaatccgggcatcatcaggttgccggtaatcacccgcgattgcggaactcgcgcttccagcaaagtgcactcttgcgcacagcgcccgtcgttccacaaaatggcagggcgtaacacccgttgctgagcatccagcaaggttgctccgtgcatctggccggcaatacccaatgctttaacgtcctgcagagaatgctgatcgcccagagctttcattgcgcgatcagttgcctgccaccactgttccgggtcttgttccgaccagagtggatgcgggcgcgaaacggtcagcttttccgtttgcgcagcaaccacctcaccctgctcgttgagcaaaataacttttacgcccgaggtgccaagatctatcccgatatacatatcgatcgttccttaaaaaaatgcccggtatcgctaccgataaccgggccaacggactgcacagttagccgttatttgtcgaacagataatggtttaccagattttccagttgttcctggcgaccactctgatgcaccggagacaaatgatgttcctgagcatatttggctaaatctgccagtgacatttggcctttcaggatttgctggcccaattcgctattccagccggaataacgctgcgcgatgcgtttatccagctcgccatcttcaatcatgcgcgctgcaattttcagcgccagtgccatcgtatccatcgcgccgatatgaccgtaaaacagatcatatttatcagtactttgacgacgtactttggcatcgaagttcagaccaccggtggtgaaaccgcctgctttgagaatttcatacatcaccagcgcattctcttccacactgttcgggaactggtcggtgtcccagcccagttgcgcatcgccacggttggcgtcgacagaaccgaacaggccaagcgcaatggcggtggctatttcatgatggaaagagtgacctgccagcgtcgcgtggttagcttcaatgttcagtttaatctctttttccagaccaaactgtttcaggaagccatagaccgtcgcggcatcgtaatcatattgatgtttggtcggttcttgcggtttcggttcgataagcaacgtgccctggaaaccgattttatgtttatgctcaaccaccatctgcataaagcggcccagttgttcacgctcctgacgcaagtcggtatttaacagcgtttcgtaaccttcacgaccgccccacaggacatagttttcaccgcccaatttatgggttgcttccatcgctgtaacaacttgcgttgccgcccagctgaagacttcaggatctgggttcgtcgccgcacccgcgccgtagcgagggtttgtaaagcagttggccgttccccacagcagcttcacgccgctctcttcttgcttgcctgccaggacatcaaccatttgcgcaaaattattgatgtactcttttaacgacgcgccctcaggggaaacatccacatcgtggaagcaataaaatggcacatgtaacttgtggaaaaactcaaatgcgacatctgctttacgcttcgccaacgccagtgcctcaccaggctgctgccacggacgattaaacgcccccacaccaaacatatccgccccgttccagcagaaggtgtgccagtagcaggcggcaaaacgcaagtgctcttccatacgcttacccaacaccagttcgtcgggattgtagtgacggaatgctaacgggtttgaggattttgagccttcataacgaacgcgatcgagctggtcaaaataggcttgcatattgaactccataatcaggtaatgccgcgggtgatggatgatgtcgtaatattgggcactccctttcagttgctcaattatgttatttcacactgctattgagataattcacaagtgtgcgctcgctcgcaaaataaaatggaatgatgaaactgggtaattcctcgaagagaaaaatgcaataagtacaattgcgcaacaaaagtaagatctcggtcataaatcaagaaataaaccaaaaatcgtaatcgaaagataaaaatctgtaattgttttcccctgtttagttgctaaaaattggttacgtttatcgcggtgattgttacttattaaaactgtcctctaactacagaaggccctacaccatgaaaataaagaacattctactcaccctttgcacctcactcctgcttaccaacgttgctgcacacgccaaagaagtcaaaataggtatggcgattgatgatctccgtcttgaacgctggcaaaaagatcgagatatctttgtgaaaaaggcagaatctctcggcgcgaaagtatttgtacagtctgcaaatggcaatgaagaaacacaaatgtcgcagattgaaaacatgataaaccggggtgtcgatgttcttgtcattattccgtataacggtcaggtattaagtaacgttgtaaaagaagccaaacaagaaggcattaaagtattagcttacgaccgtatgattaacgatgcggatatcgatttttatatttctttcgataacgaaaaagtcggtgaactgcaggcaaaagccctggtcgatattgttccgcaaggtaattacttcctgatgggcggctcgccggtagataacaacgccaagctgttccgcgccggacaaatgaaagtgttaaaaccttacgttgattccggaaaaattaaagtcgttggtgaccaatgggttgatggctggttaccggaaaacgcattgaaaattatggaaaacgcgctaaccgccaataataacaaaattgatgctgtagttgcctcaaacgatgccaccgcaggtggggcaattcaggcattaagcgcgcaaggtttatcagggaaagtagcaatctccggccaggatgcggatctcgcaggtattaaacgtattgctgccggtacgcaaactatgacggtgtataaacctattacgttgttggcaaatactgccgcagaaattgccgttgagttgggcaatggtcaggaaccaaaagcagataccacactgaataatggcctgaaagatgtcccctcccgcctcctgacaccgatcgatgtgaataaaaacaacatcaaagatacggtaattaaagacggattccacaaagagagcgagctgtaagcgttacgccccagcgcggagcgggggcgtgatttctctccatgccgcgtgaatgaattggcttaggtggagtcgttatgccttatctacttgaaatgaagaacattaccaaaaccttcggcagtgtgaaggcgattgataacgtctgcttgcggttgaatgctggcgaaatcgtctcactttgtggggaaaatgggtctggtaaatcaacgctgatgaaagtgctgtgtggtatttatccccatggctcctacgaaggcgaaattatttttgcgggagaagagattcaggcgagtcacatccgcgataccgaacgcaaaggtatcgccatcattcatcaggaattggccctggtgaaagaattgaccgtgctggaaaatatcttcctgggtaacgaaataacccacaatggcattatggattatgacctgatgacgctacgctgtcagaagctgctcgcacaggtcagtttatccatttcacctgatacccgcgttggcgatttagggcttgggcaacaacaactggttgaaattgccaaggcacttaataaacaggtgcgcttgttaattctcgatgaaccgacagcctcattaactgagcaggaaacgtcgattttactggatattattcgcgatctacaacagcacggtatcgcctgtatttatatttcgcacaaactcaacgaagtcaaagcgatttccgatacgatttgcgttattcgcgacggacagcacattggtacgcgtgatgctgccggaatgagtgaagacgatattatcaccatgatggtcgggcgagagttaaccgcgctttaccctaatgaaccacataccaccggagatgaaatattacgtattgaacatctgacggcatggcatccggttaatcgtcatattaaacgagttaatgatgtctcgttttccctgaaacgtggcgaaatattgggtattgccggactcgttggtgccggacgtaccgagaccattcagtgcctgtttggtgtgtggcccggacaatgggaaggaaaaatttatattgatggcaaacaggtagatattcgtaactgtcagcaagccatcgcccaggggattgcgatggtccccgaagacagaaagcgcgacggcatcgttccggtaatggcggttggtaaaaatattaccctcgccgcactcaataaatttaccggtggcattagccagcttgatgacgcggcagagcaaaaatgtattctggaatcaatccagcaactcaaagttaaaacgtcgtcccccgaccttgctattggacgtttgagcggcggcaatcagcaaaaagcgatcctcgctcgctgtctgttacttaacccgcgcattctcattcttgatgaacccaccaggggtatcgatattggcgcgaaatacgagatctacaaattaattaaccaactcgtccagcagggtattgccgttattgtcatctcttccgaattacctgaagtgctcggccttagcgatcgtgtactggtgatgcatgaagggaaactaaaagccaacctgataaatcataacctgactcaggagcaggtgatggaagccgcattgaggagcgaacatcatgtcgaaaagcaatccgtctgaagtgaaattggccgtaccgacatccggtggcttctccgggctgaaatcactgaatttgcaggtcttcgtgatgattgcagctatcatcgcaatcatgctgttctttacctggaccaccgatggtgcctacttaagcgcccgtaacgtctccaacctgttacgccagaccgcgattaccggcatcctcgcggtaggaatggtgttcgtcataatttctgctgaaatcgacctttccgtcggctcaatgatggggctgttaggtggcgtcgcggcgatttgtgacgtctggttaggctggcctttgccacttaccatcattgtgacgctggttctgggactgcttctcggtgcctggaacggatggtgggtcgcgtaccgtaaagtcccttcatttattgtcaccctcgcgggcatgttggcatttcgcggcatactcattggcatcaccaacggcacgactgtatcccccaccagcgccgcgatgtcacaaattgggcaaagctatctccccgccagtaccggcttcatcattggcgcgcttggcttaatggcttttgttggttggcaatggcgcggaagaatgcgccgtcaggctttgggtttacagtctccggcctctaccgcagtagtcggtcgccaggctttaaccgctatcatcgtattaggcgcaatctggctgttgaatgattaccgtggcgttcccactcctgttctgctgctgacgttgctgttactcggcggaatgtttatggcaacgcggacggcatttggacgacgcatttatgccatcggcggcaatctggaagcagcacgtctctccgggattaacgttgaacgcaccaaacttgccgtgttcgcgattaacggattaatggtagccatcgccggattaatccttagttctcgacttggcgctggttcaccttctgcgggaaatatcgccgaactggacgcaattgcagcatgcgtgattggcggcaccagcctggctggcggtgtgggaagcgttgccggagcagtaatgggggcatttatcatggcttcactggataacggcatgagtatgatggatgtaccgaccttctggcagtatatcgttaaaggtgcgattctgttgctggcagtatggatggactccgcaaccaaacgccgttcttgattttgataaaaattttctcaaagccggttacgtattaccggttttgagtttttgcatgattcagcaggaaaagaaccatgtttactaaacgtcaccgcatcacattactgttcaatgccaataaagcctatgaccggcaggtagtagaaggcgtaggggaatatttacaggcgtcacaatcggaatgggatattttcattgaagaagatttccgcgcccgcattgataaaatcaaggactggttaggagatggcgtcattgccgacttcgacgacaaacagatcgagcaagcgctggctgatgtcgacgtccccattgttggggttggcggctcgtatcaccttgcagaaagttacccacccgttcattacattgccaccgataactatgcgctggttgaaagcgcatttttgcatttaaaagagaaaggcgttaaccgctttgctttttatggtcttccggaatcaagcggcaaacgttgggccactgagcgcgaatatgcatttcgtcagcttgtcgccgaagaaaagtatcgcggagtggtttatcaggggttagaaaccgcgccagagaactggcaacacgcgcaaaatcggctggcagactggctacaaacgctaccaccgcaaaccgggattattgccgttactgacgcccgagcgcggcatattctgcaagtatgtgaacatctacatattcccgtaccggaaaaattatgcgtgattggcatcgataacgaagaactgacccgctatctgtcgcgtgtcgccctttcttcggtcgctcagggcgcgcggcaaatgggctatcaggcggcaaaactgttgcatcgattattagataaagaagaaatgccgctacagcgaattttggtcccaccagttcgcgtcattgaacggcgctcaacagattatcgctcgctgaccgatcccgccgttattcaggccatgcattacattcgtaatcacgcctgtaaagggattaaagtggatcaggtactggatgcggtcgggatctcgcgctccaatcttgagaagcgttttaaagaagaggtgggtgaaaccatccatgccatgattcatgccgagaagctggagaaagcgcgcagtctgctgatttcaaccaccttgtcgatcaatgagatatcgcaaatgtgcggttatccatcgctgcaatatttctactctgtttttaaaaaagcatatgacacgacgccaaaagagtatcgcgatgtaaatagcgaggtcatgttgtagcgatgatgagaattgtcggcgtcacatcaggtaacgctgcgtggttgtcggatgcggcgtgaacgccttatccgacctacccgccaggcatgataaaacgcaccaacaacgcttcaggctcgtagctcaactgcctgagacaaagtaaaaagccttatccgactgacaagtcggataaggctcaaggaaatgcaattacatatgcgccgcgattaaccgttggttatcctggtacattgcgaacaggtagttgttataactcttccctttggtcgagtagcccttcagcttgtgaatcatcgctgtggcagtcacttcctgatccgctttacgcagctgcgcacgcgatttacggaacgaagagtaagccgggtgcgtattcaggttagtgacataggcgctcaccgattctttgacagaactaaactgtgagtaccctttcactttacctggcgcattggtacaacgtcctttcatgcatttcatgccgaacaggttgttgttgttgcgcgccagcttcgacgttccccaaccgctttctgctgcagccatcgtcgccaccatactggtggggataatgtctacgcgttcaagcaaggtattccacgggatttttcgcgtattaccggaccacttcaccttgtagcgtttggcgatgtctttcagacgcgcacgctcagcaggtgaccattggccctgatactgttttgaaatgagccagttacgttccgcagtaatggccgcattttggctggtaatgtaaggcattacggtccggagaaacgcctttttccttggtgttccggaagggtattttcgcaaatcaggaagtgaactactctttgcactattgcgagaatactcttgtttactgcttacctgtttattactagctttagttaagtgggacttttgactcgctgttgttgtgtgcgtcttcgctaacacctcactcgaaaacaccagagtgagtaacataagaatcatcgccccatatcgtcgtatgggagtcaaaatcatcaggtctcctggtcggatttaatcattccaacaccttatatttttcacaaatttgagagttgaatctcaaatcatatcaaaaatagctgtcaagagcaccccaaggaatagtccaaatctgaaactatgtcacgtgttaacgattcagattggcgctaaatcgcagaaaatgtgggggttatcgcaaaattcagccgttttttgcgcgagatcgctcacccttgcttctcatcctgtggacttaccgctcagggatgagttttgtttggcttatcgctggcaaactgtctgaaatcgcagcaataaggactcatccgccatgaaactcgccgcctgttttctgacactccttcctggcttcgccgttgccgccagctggacttctccggggtttcccgcctttagcgaacaggggacaggaacatttgtcagccacgcgcagttgcccaaaggtacgcgtccactaacgctaaattttgaccaacagtgctggcagcctgcggatgcgataaaactcaatcagatgctttccctgcaaccttgtagcaacacgccgcctcaatggcgattgttcagggacggcgaatatacgctgcaaatagacacccgctccggtacgccaacattgatgatttccatccagaacgccgccgaaccggtagcaagcctggtccgtgaatgcccgaaatgggatggattaccgctcacagtggatgtcagcgccactttcccggaaggagccgccgtacgggattattacagccagcaaattgcgatagtgaagaacggtcaaataatgttacaacccgctgccaccagcaacggtttactcctgctggaacgggcagaaactgacacatccgcccctttcgactggcataacgccacggtttactttgtgctgacagatcgtttcgaaaacggcgatcccagtaatgaccagagttacggacgtcataaagacggtatggcggaaattggcacttttcacggcggcgatttacgcggcctgaccaacaaactggattacctccagcagttgggcgttaatgctttatggataagcgccccatttgagcaaattcacggctgggtcggcggcggtacaaaaggcgatttcccgcattatgcctaccacggttattacacacaggactggacgaatcttgatgccaatatgggcaacgaagccgatctacggacgctggttgatagcgcacatcagcgcggtattcgtattctctttgatgtcgtgatgaaccacaccggctatgccacgctggcggatatgcaggagtatcagtttggcgcgttatatctttctggtgacgaagtgaaaaaatcgctgggtgaacgctggagcgactggaaacctgccgccgggcaaacctggcatagctttaacgattacattaatttcagcgacaaaacaggctgggataaatggtggggaaaaaactggatcagaacggatatcggcgattacgacaatcctggattcgacgatctcactatgtcgctagcctttttgccggatatcaaaaccgaatcaactaccgcttctggtctgccggtgttctataaaaacaaaatggatacccacgccaaagccattgacggctatacgccgcgcgattacttaacccactggttaagtcagtgggtccgcgactatgggattgatggttttcgggtcgataccgccaaacatgttgagttgcccgcctggcagcaactgaaaaccgaagccagcgccgcgcttcgcgaatggaaaaaagctaaccccgacaaagcattagatgacaaacctttctggatgaccggtgaagcctggggccacggcgtgatgcaaagtgactactatcgccacggcttcgatgcgatgatcaatttcgattatcaggagcaggcggcgaaagcagtcgactgtctggcgcagatggatacgacctggcagcaaatggcggagaaattgcagggtttcaacgtgttgagctacctctcgtcgcatgatacccgcctgttccgtgaagggggcgacaaagcagcagagttattactattagcgccaggcgcggtacaaatcttttatggtgatgaatcctcgcgtccgttcggtcctacaggttctgatccgctgcaaggtacacgttcggatatgaactggcaggatgttagcggtaaatctgccgccagcgtcgcgcactggcagaaaatcagccagttccgcgcccgccatcccgcaattggcgcgggcaaacaaacgacacttttgctgaagcagggctacggctttgttcgtgagcatggcgacgataaagtgctggtcgtctgggcagggcaacagtaacttttccggcttcccgttcgtcagtacctcgggaagccgccaaccaggataaaatgtcagccctaatcagcgttgcaggataaagcaccgctcactcttcaacagaccgatttgcaccccagcaaatgtagcgttattgttaccttccttgctacagagttcgacagatatcccgctatgacattctccctttttggtgacaaatttacccgccactccggcattacgctgttgatggaagatctgaacgacggtttacgcacgcctggcgcgattatgctcggcggcggtaatccggcgcagatcccggaaatgcaggactacttccagacgctactgaccgacatgctggaaagtggcaaagcgactgatgcactgtgtaactacgacggtccacaggggaaaacggagctactcacactgcttgccggaatgctgcgcgagaagttgggttgggatatcgaaccacagaatattgcactaacaaacggcagccagagcgcgtttttctacttatttaacctgtttgccggacgccgtgccgatggtcgggtcaaaaaagtgctgttcccgcttgcaccggaatacattggctatgctgacgccggactggaagaagatctgtttgtctctgcgcgtccgaatattgaactgctgccggaaggccagtttaaataccacgtcgattttgagcatctgcatattggcgaagaaaccgggatgatttgcgtctcccggccgacgaatccaacaggcaatgtgattactgacgaagagttgctgaagcttgacgcgctggcgaatcaacacggcattccgctggtgattgataacgcttatggcgtcccgttcccgggtatcatcttcagtgaagcgcgcccgctatggaatccgaatatcgtgctgtgcatgagtctttccaagctgggtctacctggctcccgctgcggcattatcatcgccaatgaaaaaatcatcaccgccatcaccaatatgaacggcattatcagcctggcacctggcggtattggtccggcgatgatgtgtgaaatgattaagcgtaacgatctgctgcgcctgtctgaaacagtcatcaaaccgttttactaccagcgtgttcaggaaactatcgccatcattcgccgctatttaccggaaaatcgctgcctgattcataaaccggaaggagccattttcctctggctatggtttaaggatttgcccattacgaccaagcagctctatcagcgcctgaaagcacgcggcgtgctgatggtgccggggcacaacttcttcccagggctggataaaccgtggccgcatacgcatcaatgtatgcgcatgaactacgtaccagagccggagaaaattgaggcgggggtgaagattctggcggaagagatagaaagagcctgggctgaaagtcactaaaaattgcctgatgcgctacgcttatcaggcctacatgatttctgcaatatattgaatttggaagaatttgtaggccggataaggcgtttacgccgcatctggcataaacaaagcgcactgttccggcgttgagaaacgccggaaaacgtttcaaacaggctgctgccgtagccgatgccgctgcactttctcgacatccatgcactgcaacgcctttgtcgggcaggcttcaacacaggccggtcccgtctcccgatgccagcacagatcgcacttaatcgccctcgcctttttgcgcgaagaaacgacctccatcgcaccaaacgggcaagccagcatacagcttttacagccaatgcaacgtgtttgttcaacgaaaatatgcccatgttcgcggcttatcgcgtcaacagggcagacattcgcgcacggtgcatcttcacactgatgacaggctactgccgtggtccagcagtggtctttaatgacacgaatacgggaaataaactcgtctggtgacaacgcagcgcaatcctgattctcatgatgcgacactgcgcaagccacttcacaggtacggcaaccgatacatttcgtcgcatccgcaataataaaccggttcatgatcactcctttgcactaaaacagcagagtgccagagagcgcgtccctactgctttgatccaacgaaggaaatgttaaagttttggcacttgtccaaagcgttatgtgatcgcgcccaggtcatccctgacagtaaatcccagttcattagaaatagcctgcgcggtttcacgcagtggtttcaggagatttttctctcccacctgtttcagacgtgatgtcgaaagcgaaatcgacacggcgtacggcacccgcccatgaatatcaaacaccggaacagcaatacaggagacgccgagttcgttttcttctctgtccatcgccgctccgctttcacgaatgtgcgccagttcgtcgaacatcgcgggcagctcggtaatggtattgcgggttaacggctggatctcatgctgatggctttcccagtatgacttcacgtagtccgggtgaccaaacgccatgtagatcttgcccattgcggaacagtagagcggcatatgctggccaatataggcacgggttcgcagcatcccggttgtgggttccagcttataaatcaaaatagcgtgatcgtcttcgcggctggagaagttaatggtttcaccagtggcgatgttcagtgcctcaagatgcggagcggcgatatgaatgatattcagcgaagacagcgccttctgcccgacggcaataaatttggtggtcaggcgataactccctgcggcaggcgcggtggtcacatagccgcaggactgtaatccctgcaataagcgatggacggtactcttatttaaaccagccagctccgaaagatgcgccaacggacaaccgtttggatagttgctcaaaatctcaatcagcatcaacccgcgaaacagactctggcttccggctggacgctctttttcctgcgccatctcgttctctttttttcccatcacttctttccccattttgtcgcgtcctgatggtagcgcaaagtgtgccgtagttcacgatctcgacagataatttataaccaattgatttttatgtcttttgaaattcatcaatcagattgccttgttaaaaagtgatcgatatatttgaaatcaagtttcgcatattgaaattttaagccaaaaaagcgatcaaaaaaacaaggaagcctgggatgaaagtgacatttgagcagttaaaagcagcctttaatcgggtcttaatttcacgcggcgttgacagcgaaacggctgacgcctgtgcagagatgttcgcccgcaccaccgaatccggcgtttattctcacggcgttaatcgtttccctcgtttcattcaacaactggaaaacggcgatatcattcctgatgcccaacccaaacgtataaccagcctcggcgcaattgaacagtgggacgcccagcgttcgatcggtaacctgacagcgaaaaagatgatggatcgcgccattgaactggctgccgatcacggtattggtctggtggcactacgtaatgccaaccactggatgcgcggcggcagctacggctggcaggcggcggaaaaaggctatattggcatttgctggaccaactccatcgccgtaatgccgccgtggggcgcaaaagagtgtcgcataggcactaacccgctgatcgtcgccattccttccacgccgatcaccatggtcgatatgtcgatgtcgatgttctcttacggcatgttagaagttaaccgtctggcaggtcgtcagctcccggtcgatggtggctttgatgatgagggcaatttgaccaaagaacctggcgttatcgagaagaatcgccgcattttgccgatgggctactggaaaggttctggcatgtcgattgtgctggatatgatcgctactctcctttccgacggcgcatccgttgccgaagtcacccaggacaacagcgacgaatacggcatttcacaaatttttattgccattgaagtggacaagcttatcgacggtcccacccgcgatgccaagctgcaacgcatcatggattacgttactagtgccgagcgtgctgacgaaaatcaggccattcgcttacccggccatgaatttactaccctgctggccgaaaaccgccgtaacggcatcactgttgatgacagcgtgtgggccaaaatccaggcgttatgaggagataagtcatgatttttggacatatcgcgcagcccaatccgtgccgtttgcccgccgccattgaaaaggcgctcgattttctgcgcgctaccgatttcaacgccctggagccgggcgttgtcgaaatcgacggcaaaaatatttatacgcaaattatcgatttaaccacacgcgaagcggtggtaaaccgtccggaagtgcatcgtcggtatatcgatattcagtttctggcgtggggcgaagagaaaatcggcattgctattgatacgggaaataataaagtcagcgaatcactattagagcagcgcaatattattttttatcacgacagtgaacatgaatcatttatagaaatgataccgggcagctacgcaattttctttccgcaggatgttcaccgaccaggttgtattatgcaaacagcctctgagatacgaaaaattgtggttaaagtcgcattaacggcgctgaattaatcgaataatcgtctacgccagaacgcctgggtaatgttattgctctaactatattaataattcaggttgctgcacatgcgacttgaattatgacagacatagcctcaaggaatagctatgaaaaaaatactcgaagcaatactggcgattaatctcgccgtactttcctgtattgtatttataaacattattttaagatatggttttcagacaagcattttatctgttgatgaattgtcacgttatttatttgtctggttaacgtttattggcgcgattgtagcttttatggataacgcccacgttcaggtcacctttctggtggagaaactctcccccgcatggcagcgacgagtcgctctggttacccattccttaatcttatttatttgtggcgcactggcctggggcgcaacgctaaaaacaattcaggactggagcgattattcaccgatcctcggtttacccatcggcctgatgtatgccgcttgtctgcccaccagcctcgttatcgcattctttgaactgcgtcatttatatcaactcatcacgcgtagcaattctctaacgtcgccaccgcaaggagcttaatcatggctgtgctgatttttctgggctgtctgttgggtggtattgctatcggtttgcctattgcctgggcactgttgttgtgcggggcggcgttaatgttctggctggacatgtttgatgtccagatcatggcacaaacgctggtgaacggagccgatagcttctccctgctggcgattccgttctttgtgctggcgggtgaaatcatgaatgcgggcggcttgtcaaaacgcattgttgacctgccgatgaaactggtggggcataaaccaggcgggctgggctacgtcggcgtgctggcagctatgattatggcgagcctttctggttctgccgttgcggataccgccgccgttgccgctctactggtgccgatgatgcgcagcgccaactatccggtcaaccgggcggcggggctgattgcctctggcggcattatcgcgccaattattcccccttccattccgtttattatcttcggcgtttccagcggattatccatcagtaagctgtttatggcgggcattgcccctggcatgatgatgggcgcaacgctgatgcttacctggtggtggcaggccagtcgccttaatttaccccgccagcaaaaagcaacgatgcaggaaatctggcactcttttgtctccggtatctgggcgctgtttcttccagtcatcattattggcgggtttcgctccggcctgtttacccctaccgaagccggggccgttgctgctttctatgcgctgtttgtcgccacagttatttaccgtgaaatgaccttcgccacactttggcatgtactcattggcgcggcgaaaaccacctcagtggttatgtttctggtggcctcggcacaagtttccgcctggctgattaccattgctgaactgccgatgatggtttctgatttactgcaaccgttggtcgattcaccgcgtctgctgtttatcgtcattatggtggctatcctgattgtcggcatggtcatggatttaacgccgacggtattaattcttaccccggtattaatgcctttagttaaagaggcaggaatcgatccgatttatttcggtgtcatgtttatcattaactgctcaatcggcttaattacaccgcctatcggtaatgtacttaacgttatttcaggggtggcaaaactcaaattcgatgatgcagtcagaggcgttttcccttacgtcctggttttatattcattattagtcgtatttgtttttattcccgatctcatcatcctccctttgaaatggattaattaaaaggaaaatattatgaaattacgctctgtaacctacgcattattcattgctggcctggctgcattcagcacatcttctctggcggcacaatctttacgtttcggttatgaaacatcacaaaccgactcgcaacatattgcggcgaaaaaattcaatgatttattgcaggagagaaccaaaggcgagctgaaattaaaactgttcccggacagcactctcggtaacgcgcaggcgatgatcagcggcgtacgtggcggcaccatcgatatggaaatgtccggctcgaataactttgccgggttatcaccagtgatgaacttgcttgatgtccctttcctgttccgcgataccgctcacgcgcataaaacgctcgacggcaaagtcggtgatgatctgaaagcctcacttgaaggtaaaggactgaaagtactggcctactgggaaaacggctggcgcgatgtcaccaactcgcgcgcaccggttaaaacccccgccgacctgaaagggctgaaaatccgcaccaacaatagcccgatgaatatcgccgcattcaaagtctttggcgctaacccgatcccgatgccgtttgccgaagtctataccgggctggaaacccgcactatcgacgctcaggaacacccgatcaacgtcgtctggtcagcaaaatttttcgaagtgcagaagttcctttctctgacgcaccacgcctattccccgcttctggtggtgatcaacaaagcgaagtttgatggcttaagtccggagttccagcaggcgctagtttcatctgcacaagaagcgggtaactatcagcgcaaactggttgctgaagatcagcaaaaaatcatcgacggcatgaaagaagcgggcgtggaagtcatcaccgatctcgaccgcaaagcctttagcgacgcactggggaatcaggttcgcgacatgtttgttaaagatgtgccgcagggagctgatctgctgaaagccgtggatgaggtgcaataaaccatgacgcaatactggctggggttagattgtggcggtagctggctgaaagccgggctgtatgaccgcgaaggccgggaggcaggcgtgcagcgcctgccgctgtgcgcattaagcccgcagccaggctgggcagagcgcgatatggcagaactgtggcaatgctgcatggctgtcattcgcgccctgcttactcattctggtgttagcggggaacaaattgtcggtatcggcatctccgcacagggaaagggcttgtttttgctggataaaaacgacaaaccgctcgggaatgctattttgtcctcggaccgccgggcgatggaaatcgttcgtcgctggcaggaagatggcatcccggaaaaactctacccgctgacccgacaaaccttgtggaccgggcatccggtgtcgctgttacgctggctgaaagagcacgaaccagaacgctacgcgcaaattggctgcgtgatgatgacgcacgactacctgcgctggtgtttaactggcgtcaaaggctgtgaagagagcaatatttccgagtccaacctctacaacatgagtcttggggaatatgacccgtgcctcaccgactggctggggatcgctgaaatcaatcacgccctgccgcctgttgtcggatctgccgaaatctgcggggagatcaccgctcagacagccgccctgaccggtctgaaagcgggtacgcccgttgttggcggcctgtttgatgtggtttccaccgcactctgcgccgggatcgaagacgaatttaccctcaatgcggtgatggggacctgggcggtgaccagcggcataacccgcggtttacgtgacggtgaagcgcatccgtatgtctatggtcgctacgttaacgatggtgaatttatcgttcacgaagccagccctacctcttccggcaacctcgaatggtttaccgcacagtggggagaaatctcgtttgatgagatcaatcaggccgttgccagcttgccgaaggctgggggcgatctctttttcctgccgttcctgtacggcagcaacgccggactcgagatgaccagtggtttctacgggatgcaggccattcacacccgcgcgcacctgttgcaggccatctatgaaggggtggtgttcagccatatgacccacctcaaccgaatgcgcgaacgttttactgatgttcacaccctacgcgtcactggcggcccggcgcactccgatgtctggatgcaaatgctggcggacgtcagcggtctgcgtatcgagctgccgcaggtggaagaaaccggctgctttggtgcggcccttgccgcccgcgtcggcaccggggtttatcacaacttcagcgaagcccaacgtgacttgcgacacccggtgcgcaccctgctgccagatatgaccgcccatcagctttaccaaaaaaaatatcaacgttatcagcatctcattgccgcacttcagggctttcacgcccgcattaaggagcacacattatgagccgaccacttctgcaactggccctcgaccactcatcacttgaagccgcgcagcgcgacgtgacgctgttaaaagacagcgtcgatatcgtcgaagcgggcaccattctctgtttaaacgaagggcttggcgcggtgaaagccttgcgcgaacagtgcccggacaaaatcatcgttgctgactggaaggtcgccgacgctggtgaaacgctcgcgcaacaggcgtttggcgcaggcgctaactggatgaccatcatctgcgccgcgccgctcgcgacggtagaaaaaggccacgcaatggcacaacgctgcgggggtgaaattcagatagagctgttcggtaactggacgctggacgacgcccgcgactggcatcgtattggcgtgcggcaggccatttatcatcgcggtcgtgatgcacaggccagcgggcaacagtggggcgaagccgatctggcacgcatgaaggcgctttcagatatcggccttgagctttccattactggcgggattacccctgctgacctgccgctgtttaaagatatccgcgtgaaagcgtttattgccgggcgggcactggcaggcgcggcaaatccggcgcaagtggctggcgatttccatgcgcaaatcgacgctatctggggaggtgcgcgtgcgtaatcatcagttagggatttatgaaaaagcgctggcgaaagatctctcctggccggagcggctggtgctggcaaaaagctgcggttttgattttgtcgaaatgtcggtggatgaaaccgacgaacggctctcacgtcttgactggagcgccgcacaaaggacttcgctggttgccgcgatgatcgaaacaggtgttgggatcccgtcgatgtgcctgtccgcacatcgtcgctttccctttggtagccgtgacgaggcagtgcgcgaacgggcgcgggaaatcatgagtaaagcgattcgcctggcgcgcgatctcggcattcgcaccatccagctggcaggttatgacgtctattacgaagaccacgacgaaggcacccggcaacgttttgctgaagggctggcgtgggcagtcgaacaggcggcggcatcacaagtaatgctggcggtggagattatggataccgcgtttatgaactccatcagcaaatggaaaaaatgggacgagatgctcgcctcaccgtggttcaccgtctacccggacgtcggcaacctcagcgcctggggcaatgatgttcccgccgaactgaaactgggcattgaccgtatcgccgcgatccacctgaaagacacccagccagtcaccgggcaaagtcccggacagttccgcgacgtgccgtttggcgaaggctgcgtcgatttcgttggcatcttcaaaacgctgcataaactgaactatcgcggttctttcctgattgagatgtggaccgaaaaagccaaagagccggtgctggagattattcaggcgcggcgttggattgaagcgcgtatgcaggaggctggatttatatgttagagcaactgaaagccgacgtgctggcggcgaatctggcgcttcccgctcaccatctggtgacgttcacctggggcaatgtcagcgcggtagacgaaacgcggcaatggatggtaatcaaaccttccggcgtcgagtacgacgtgatgaccgccgacgatatggtggtggttgagatagccagcggtaaggtggtggaaggcagcaaaaaaccctcttccgatacaccaacgcatctggcgctctaccgtcgctatgccgaaattggcggtattgtgcatacccactcgcgccacgccaccatctggtcacaggccgggctggatctccccgcctggggcaccacccacgccgattatttttacggtgccatcccctgcacgcgacagatgaccgcagaggagattaacggcgaatatgaatatcagaccggcgaagtgatcattgaaaccttcgaagaacgtggcaggagtccggcacaaatcccggcggtgctggtgcattctcacggcccgttcgcatggggtaaaaacgccgccgatgccgtgcataacgccgtagtactcgaagaatgcgcctatatgggtctattctcgcgccagcttgcgccgcagctccctgcgatgcaaaacgaactgctggataagcactacctgcgtaagcatggggccaatgcctattacgggcagtaatccctcacgccggggcttcatcgccccggcactacgaattgatatgttccttgctgtaacgccgcttccacgctgctggcgttaaaccagtatgtttctgaaaaatctgccggaaatagccaacgtcattaaaccgtattgcatggagcaggccgacaacgtcgagtcactgcataacctgttgctgcccgccgatgcgccatttacgacatttgaaggcaagggattgttcagccataagatcctgattcagacgccaggttcccggtatgaacagagcaatccagagcaacaacctttgtggcattacgacggagcaccagccgcaccgacatccaccggtgaattaaaaacgccagctcaccccggtgacaaaggtaaaactctcattacgatcaatcatcgggctgtcggtaatctcttccggcagctcgctgtatcctgcgctcgccatcaatacgacgtgctctcctatcgggtattttgccgtcaggctgacatagggcacccaggcatcctgcgcggaataacttgccagaccgctacgacgggactcactctctgaaatgccatagtaatagtcactgaaattctcgtcataatagagaacgcccagcgcaggtgtcagcgacagacgacctatctgcattttgtggaataccgatagctcccccacccagccgttgctgttatccagaacgtccgcagctgcagaggctttcacggttccccaacgctcgtggtgataccaggcaacccccgccatagccgtactatcacgcttatcaagctgttgcatggcataatcgtcattatcggtagggtcaaattccagcggcatccaggatgcggtcaggctaagttcatttttttcactttgcgacagaataaaacctaacgtggtctgacgaacataaaaagtatcaccttcataactaatcagcggaattgccttcgtattttcattataaccgcgataaggcgattcattataagccgcaccagcaccaatggataattcagaagcagttgcgcttgccataaaaggcaacgcaaataacgccacaatattgcgattaattaacatgtccggtattccattttaaaataagataaaaaagagtcggcataataatgcttacaatttctccggtgcaagattcatatttatatagtaatatataaaattatatataattgggctgttgcgatgacaaaattacaacttaagtaccgggagttaaaaattatctcggtaatcgctgccagtgaaaatatcagccatgccgcgactgtacttggcatcgcacaggccaacgtcagcaaatatcttgctgattttgaatcaaaagtgggtttaaaagtctttgaccgaaccacccggcagctgatgctcacaccttttggcaccgcgctgttaccgtacatcaacgacatgctggacagaaacgagcaacttaataattttattgcagattataagcatgagaaacgtggtcgggtcaccatctacgccccaaccggcataattacctatttatccaaacatgtaatcgataaaattaaagatatcggtgatatcaccttatcgctaaaaacctgcaatcttgagcgtaatgccttttatgaaggcgtcgaatttcctgatgattgtgatgttttaatcagctacgctccaccaaaagatgaatcgctggttgccagttttattacccaatatgccgtaaccgcttatgccagccagcgctatcttgagaaacatcccattagccgtcctgacgaactcgaacatcactcctgtattttgatcgactcgatgatgatcgacgacgcgaatatctggcgcttcaacgtcgccgggagtaaagaggtgcgggattatcgcgtgaagggaaattacgtttgcgacaacacgcaatctgcgctggagctggcacgaaatcacctggggattgtgtttgcgccagacaaaagtgtgcagagcgacctgcaagacggcacgctggtgccctgctttcagcaaccctatgaatggtggctggatctggtggctatcttccgtaaacgggaataccagccctggcgggtccagtatgtgctggatgaaatgctgcgtgaaattcgccaccagcttgctcagtcgcagcaactgcggcctgaacaagcggcggaaagcgaagattaatgatcgagataaaggtaatgcacccagctggtcatgcgtaatagcactttgcgcatcaccgagacatggctgaaatgatcagagtaaaccgccacctgggcgtaaataccgtctggtaaagcgctcaaatcagtgtgctcatccagttcaatggtcgcgataacgccatctgaacccggcgctgtgtttaacgtctgtaaggtgccggtcgactgataagctccgccgggaacggctggactaatggctgccagcttaccgctgaataccttacctggcagagcattaaacaccacttccgcatcgtcgccaggagccagtcgcagcaaggagttctgacggaactgcgccacgatttgtcgtttctgatcgggtataaacaccatcaccggacgtagcggcagcgacgcggcataggtacccggacgaatcagtacctgggtcacataaccatcgctcggcgcacgcactatcgtctgctcaaggttatattttgcttccgcgagctgtgctttcaggctggcgatttgagaatgttcacccaacaccaggctatccagctggctctggatctgtttttgttccgccgccgatgacttcacggaggcttcctgcgccagataattttgccgcgccacatcgatatcgcgttctgaaaacgggtttactttcgcctggctgccacgtgcgtaacgctgatactctttagcgaatttatcccgcgtggcctttgcctgctgagtattcgccgccatctcatctaactctgcgcccaacgcccgctgtttatgttctgcggtaacgatatccgccatcagccgatccacccgcgcctgataacgcgtcgggtccagtcgaaatagcacctcaccttttttaatcagcgtatttttcttatccgtcacttcaatcaccacaccagtcacctgtgggacaacaggaatagaaataaccgctttttgcgctttaaaggtatacggatggttatagttcattaacagaattagaccgctgacaataaatattccacccagggccgctgtgggaatggtccatttatttacgggaattttgaagatcttaaacattgcccatgcaaaagccacataggtcaaaataatcagtaaatccataagtattactcggcagaagaggatttgatgtcggcgagctgtttctccagcccggcaatgcgctgttgcagttgcataacggatgaatcatggctttgcattccccatccccgctccgggcggtaaagcgtggcccaaatccacaaaaacggccagataacatgtaacgtaaaaagactcacccaaccagcaacatgaatggcgtcggcatgaggatgattacgttttttggcaatcaggtagggaatatcatgtaaaataatgatcccatagaagatcaccagaaatacaaaaataagcactcccagtgcaaaatagtccaggaacatatttccctcaaagaatataaaaaagaacaattaacgcatattatgaaatgccatgatgcagtgcaatttccttatttatataacgacatattgttttttatatactttcttaaatgtgctgtctggtttttcaacaggacgaggtttatcatattgaaatagtggaactattggccaaactaatgaataactccagtaaaacatccacagtacagattaagcgtattaaaccttcaattatctaccgtttattgctgattggcctcggatcaccaatggtgatttacggcctggttcgcccgctcaccatcgaaacgcgagattaaactcctgacaaaacacgccccagaaacgtacttctgttggcgtagtctgggttattgcgcacgtaggtttaaaacgtaaattgtaacaacgtgcgctttgtttatgccggatgcggcgtgtacgccttatccggcctacggtcaggttcccgtaggcatgataagacgcgtaagcgtcgcatcaggcaatgaatacccaatgcgaccagcttcttatatcagaacagccccaacggtttatccgagtagctcaccagcaggcacttggtttgctggtaatgctccagcatcatcttgtgggtttcgcgaccgatacctgattgtttgtagccaccaaacgccgcatgtgccgggtaagcgtgataacagttggtccacacgcgcccagcctgtatgccgcgccccatcttataggccagattaccgttgcggctccagacgcccgcgcccaggccatattgcgtatcgttcgccagctccagcgcttcttccatcgttttgaaggtggtcaccgccagcaccgggccaaaaatctcctcctggaacacccgcatattgttctgaccaaacagaatcgtcggttcgaggtagtagccgtctttcagttcaccttccagcagcttgcgccgcccgcctgtgagcacgtcagcgccctcttttttaccgatatcaatgtagttgaggatggtttccagttgcccgtgagaaacctgcgcgcccatttgcgtcacgctgtcgagcgggttaccgctacgaatgctttcgacacggcggatggcgcgttccataaagcgttcgtagatagattcctgcactaaagcacgactcggacaggtgcaaacttcgccctggttaaaggcaaacagtgcaaagccttccagcgctttatcgaaaaaggcatcttcttcatccatcacatcagcaaagaagatatttggcgacttaccgcccaactccagcgtcaccggaataatgttttgcgttgcgtattgcataatttgttggcccacttccgttgagccggtaaacgccactttggcgatgcgtttcgaggtcgccagatattcgccaattaccccacctgcgccattgaccacgttcaccacgcccggcggcagtaaatcaccgacaatttccattagcagcagtacagaaagcggggtaagacgtgcgggtttcagcaccacacagttgcccgccgccagcgcgggagccattttccagctcgccatcagcagcgggaagttccacgggataatctgccccaccacgcctaacggttcatggaaatgataggccacggtttcgctatcaacttcactgatcccaccttcctgcgcccgaatacacgaggcgaaatagcggaaatggtcaatcgccagcggtacatccgcagcactggtttcgcgaatgggtttgccgttatcccaggtttcagctgtcgctaacagctcgaggttttgttccattcgatcggcaatcttaaacagaatcgccgcacgatcctgcaccgaggtgtgcgcccatttatctttcactttgtgcgcagcatccagcgccagatcgatgtctcgtttgcccgaagacgccacttcgcacagcagctgcccggtcaccggcgtcagattctggtaatactcgccgtcggcaggggctacccattcgccgccaataaagttgtcatagcgggcttttaacttgagggggaaaccatactcgccgggcttaatctgtgctgaagggggattattggtcatgatcgtctccttgcggtgtgaggtataacaagggtagacgtgactggcgaaatcttcgccagtcggtaacagctttacgacagctatcacgaatttacgggcaagggttacagagatagttgaaaaagcggctaacaatttgccagccgttgtggaaatgatgattacatcgctgcgcgataaatcgccacaatttcttcgtgagttgcctggatcgggttagtaaagccacaggcatctttcagggcattagtcgccaataccgcgaaatcttcttctttcacgttcaggtcgcgtaggcctgccgggatatccactttcttcgccagttcacggatggcgttaatgcaggcttcagcaccttccgcgtcgtttttacctgtcacgttcacgcccattgcagcggcacagtcacgcagacgtgcagcggcgactttgctgttgaatacctgaacgtgcggcagcaaaacggcgttacatacaccgtgtggcaggttgtagaaaccgcccagctggtgcgccatcgcatgaacataacccagagaagcattattgaacgccataccggcgaggaactgggcataagccattgcttcacgcgctttcgcattactgccatcttcaacggctaacggcaggttttcggcaatcatggtcacggctttcagtgcacaagcgtcagtgatcggcgtggcggcaatagaaacatatgcttcgatagcgtgcgttaaggcatccatacccgttgcggcggtcagtgacttcggcataccaatcatcagagaggagtcattgacagaaagcagcggagtgacatgtttatcaacaatcgccattttgatatgacgcgcttcgtcagtgatgatgcagaaacgggtcatttcagaggccgtacccgccgtggtattgatggcgatcatcggcagctgcggttttgcagagcggtcaacgccttcgtaatcgcgaatatcgccgccattggctgccaccagcgcaataccttttgcgcagtcgtgtggagaaccaccgcctaaggagatcacgctatcgcaattattctctttaagtaatttcaaacctgcggcgacgttttccgtggtggggttaggttgggtgccatcataaataacgctaaaaatattgcgttcttccagtgctttttgcacatcgcccgccatacctaatttcgttaacatattgtcagtgacaattaaggtacgggtaaatccataatctgccatcatattcattgcatcagtcaatgaatcagcgccgatgacattcacagaaggaataaagaacgttgaagctgccataacacactcctgaaagtgtaaaaaagggcgggcagcttactgaggattttcattcgaaaatatgatcagtattattgattatcaaaattaatctaataaaaagcacattgtattcattaaacaatgtgctttttttaaattcataagaattttgtattaatttattttaaaacttaattaatcatttccttatttttccggaaataataatgcgtcgcgcaataaatgatcatttccacgacgacgcgtaaagccaatgcggtcaaaatattccagaatctgaattgccagctttcggcctacgcctaagcgatcgcggaaatccgccgcgcaggttgaaccacactcctgatcgagatcgcggatcatattggcaaactcgacaatccgatcgttacggtaataacgatctttaacgatcgcggtaattattccttgctgcgccgcctggcgtagagtcaggcgcattgcctgctcgtcggttcccgtctcttttgccaggtcacgcacccaccacggttcgtcaccaaacagtggctctgctttttgccagatggcctgctgctcttcgctgaagcccgctttgtgatctggcagatgcagccagccgtgatggctgtggatgtcgccgctttcgcgcatcttttcaatcagcaacagtaccagcgcttcatcttccattggcaacgccatacgtcgcagacgttcgcgcccagggccaggttcatcgcgatgttgctcatgataagtcgctaatgtgtcgagaattttccgctgccagcgggcggcaaccggcgcattcaacaagctataaccagcctgaatataaccaggctgttgcagcaattcgcgcatcccttcgccgttgagctggcgcgcccaggcgaaatccgcaaggttaaccgcgccgcgttccagatgaacagataacgcatcggcatcgctctgcgcccgtgcaagagacgccagccattgcagatattccggcttacgtttaccgcgacgcggcgggttaagcatcacgacgcgcgctccggccagcgtgttgcgggcagagatatcgcgcaataccaggcggtcgttatctgccagccataacggggtgtcgaagaccagttcagcaaggttatcttccagcagtgaaacgcgtcccgtgacgtggctggcggcgtggtgaatatgcagcggctgccactgggtcagcggtgtatgggtttgaagctcgacaatcacccgtgtgaacggctctggcggcacatcggcaagcagccagtcgccacggttaatctgctctttttccgcatcacccgcgatgttaagcgcgatacgctgcccggcattggcggtttctgttggctggttttgcgcatgcagcgcacgtacacgcatcggtttatttacaccagtcagccagagtgaatcgcctaccttcacttccccgcttaacgccgtaccggtgacgaccagcccggcaccttttacggtaaatgcgcggtcaatcgcgaggcggaaactatgttggctggcgtgctcgcgttccggcaactgaagcagatgctcgcgcagggcatccattccccgaccttcggttgctgcggtgataaacagttttgcctcagcaaaaccgtattcccgcagaacctcctttacctggcgttcaacctcatcaacacgcgcttcgtccacgcgatcggctttggtcagcgccactgtcagcatcgggttaccggtcagctgcaaaatcgccagatgctcacgggtctgtgccatcacgccgtcatcgcacgccaccaccaacagcgcgtgatcgataccaccaacgcccgccagcatgttggaaagaaacttttcatgaccgggaacgtcgataaaaccaggcacgcgaccatccggctgcggccagtaggcatagccgagatcgatggtcatgccgcgctttttttcttccggcagacggtcagcatttacgccagtaatcgcctgcaataaggttgttttgccgtggtcaacgtgtccggcagtcgcaataatcatttcaacaacatctccaaaaaccgttgctcatcttcaaggcagcgtaaatccagccacaatcgtccgtcataaatacgaccaatcaccggcactggcaattcacgccagcgggcggctaatgactcaaggtggctaccgcgtccatcatggggtgtaaacgttaatgccgcgctcggcaggcgatcaaccggcagcgaaccactgccaatctgcgaaagacatggcataacctgtaccgcaaactccgcgccgtaatgtgcggcaaggggggcctgtaaacgttgtgcctggatttgaatgacctctgcgctgcgggtaagcaggcgcagggtcggtaatttttcactcagagcttcagggtgtaaataaagacgcaacgtggcttccagcgccgcgagggtcattttatccgcgcgtaatgcacgcttcagcgggtggctttgcaggcgggcgatcatctcttttttaccaacaataattcctgcctgcggcccgcctaacaacttgtcgccggagaaactcaccagactgacgcccgccgcaatcaactcctgcggcattggctctttcggcaaaccgtactggctaagatcgaccagcgagccactgcctaaatcagtcactacgggaacatccagctctttgccgagcgccaccagttccgcttcatctatcgctttggtgaacccctgaatgctgtagttactggtatgtactttcatcaacagtgcggtattttcattcaccgcctgacgataatcattcgcgtgcgtgcggttggtggtccctacttcgtgtagggtgcagcctgcctgacgcataacatcgggaatacgaaacgcgccgccaatctccaccagttcgccgcgagataccaccacctcttttccgctggcagtggccgccaacatcaataacaccgccgccgcattgttattgacgatacaggcatcttccgcccccgtaatacggcacagcagctgcgccagcgcccgatcgcgatgtccgcgtccggcgtcgtccagatcatactcgagggtcactggcgaacgcatagcctgcgcaacggcttccaccgcggcttccgcctgtaaagctcgcccaaggttggtatgcagcacggttcccgtcaggttgatcaccggacgcagcgcgctctgcgcttctttcgtcaaccgggcatcgacttcttgcgcccagttttcacaccacgcaggcagcgtctggctgccacgaatcacttctcgcgcttcgtcgagcatctgacgcaacaattccaccacgcgggtgtgaccataagtatcacgcaaagaaaggaaggagctatcgcgcaataagcgatcaatagccggaagttgactatagaggaaacgcgtttcggttgtcataggaaacctggctgatcaaggccctctcacacggagaagggcgtttaacataaccacggattgtaacgtgagatgggtcaggaggacatatcgcgcatcaagcctttggcggttcggtgcgagcaaaactttcgcggctaaacaggttttcgaccagtttgactaagtgtgggcggtcgacacaccaacctggcgcaacgcggcggaaattgagatatccgacggcacaggcaatggcgatagtcgccagattgaccgtatcggttttgagtgtgccatcgaccagatatccttccagcacatccagactgcggttgattttctcccgctggcgtaacaattcatcttcagactgctgcgccgctggacgcgcctgttcacgcaccgataccagcccggcatccataatgccatccgccagtgcctcaattttgcgcacccgcaacgactccagcggatcgcgcggcaacatcgccggagcgacattcattaattcaatatattcagcgatgatcggcgaatcaaaccagcattcgccctcttcggtcaccagcaccggcacttttcctaacgggttaaattgcgccacgccgttgtccgcgttatagggcagttcattaataaattcgaaagttatgcccttttctaacaacagaatagaaagtttgcgtacaaacgggctggtgtagctaccgacgagtttcatgccgagtcctttgtgcgaggaaaaatatcagtatggcctggtgatgggaaaaagggcagaaaatgttgatggtttgttacttccaaataaatcacatatttatcatggtgatataaatattttcctaattatttcactctgatggatatctcacttcaggctttcttataaatctgtagggtttcgcctgtcagcagacaaataacccgataaaacaaggatgagaaatgagcggaaaaccggcagcgcgtcagggcgacatgacgcagtatggcggtagcattgttcagggttcagccggggtgcgcattggtgcccccaccggcgtggcctgttcggtgtgccccggcggagtgacgtccggccatccggtcaatcccctgctcggtgcaaaggtccttcccggtgaaaccgacatcgccctgcccggcccgctgccgttcatcctctcccgcacctacagcagttaccggacaaaaacgcccgcgccggtggggagcctcggccccggctggaaaatgcctgcggatatccgcttacagctgcgcgataacacactgatactcagtgataacggcggcagaagcctgtattttgagcacctgtttcccggtgaggacggttacagccgcagcgagtcactgtggctggtgcgcggcggcgtggcgaaactggatgaaggtcaccggctggccgcactctggcaggcgctgccggaagaactccgcttaagtccgcatcgttatctggcgacaaacagtccgcaggggccgtggtggctgctcggttggtgtgagcgggtgccggaagcggatgaggtgctgcctgcgccgctgccgccgtaccgggtactgaccgggctggtggaccgcttcgggcgcacacagacgttccaccgcgaagccgccggtgaattcagcggcgaaatcaccggcgtgacggatggtgcctggcgtcacttccggctggtactgaccacgcaggcgcagcgggcagaagaagcccggcagcaggccatttccggcgggacggaaccgtccgcttttcctgataccctgccgggttacaccgaatatggccgggacaacggcatccgtctgtctgccgtgtggctgacgcacgacccggaatacccggagaatttacctgccgcgccgctggtgcgctatggctggacgccccgcggcgaactggcggtggtgtatgaccgtagtggcaaacaggtgcgcagctttacttacgatgataaataccggggccggatggtggcgcaccgtcacacgggccggccggaaatccgttaccgttacgacagcgacgggcgggtgacagaacagctaaacccggcaggcttaagctacacgtatcagtatgagaaagaccgcatcaccatcaccgacagcctggaccgccgtgaagtgctgcacacgcagggcgaagccgggctgaagcgggtggtgaaaaaggaacacgcggacggcagcgtcacgcagagtcagtttgacgccgtgggcaggctcagggcacagacggatgccgcaggcaggacaacagagtacagcccggatgtggtgacgggcctcatcacgcgcataaccacgccggatggcagggcatcggcgttttactataaccaccacaaccagttaacgtcagccaccgggcctgacgggctggaattgcgccgggaatatgatgaattgggccgtctgattcaggaaactgcccctgacggcgatatcacccgctaccgttatgataatccacacagtgacttaccctgcgcaacggaagatgccaccggcagccggaaaaccatgacgtggagccgttacggtcagttgctgagcttcaccgactgttccggttatgtaacccgttatgaccatgaccgcttcgggcagatgacggcggtgcaccgcgaggaagggctgagtcagtaccgcgcatacgacagccgtggacagttaattgccgtgaaagacacgcagggccatgaaacgcggtatgaatacaacatcgccggtgacctgaccgccgtcattgccccggacggcagcagaaacgggacacagtacgatgcgtggggaaaggccgtccgtaccacgcagggcgggctgacgcgcagtatggaatacgatgctgccggacgggtcatccgcctgaccagtgaaaacggcagccacaccaccttccgttacgatgtacttgaccggctgatacaggaaaccggctttgacggccgcacacagcgttatcaccacgacctgaccggcaaacttatccgcagcgaggatgagggtctggtcacccactggcactatgacgaagcagaccgcctcacgcaccgcaccgtgaagggtgaaaccgcagagcggtggcagtatgacgaacgtggctggctgacagacatcagccatatcagcgaagggcaccgggtggcggtgcattacaggtatgatgagaaaggccggctgaccggtgagcgtcagacggtgcatcacccgcagacggaagcactgctctggcagcatgagaccagacatgcgtacaacgcgcaggggctggcgaaccgctgtataccggacagcctgcccgccgtggaatggctgacctacggcagcggttacctggcaggcatgaaactcggcgacacaccgctggtggagtacacccgcgaccgcctgcaccgggaaacgctgcgcagcttcggccgttatgaactcaccaccgcttatacccctgccgggcagttacagagccagcacctgaacagcctgctgtctgaccgcgattacacctggaacgacaacggcgaactcatccgcatcagcagcccgcgccagacccggagttacagctacagcaccaccggcaggctgaccggcgttcacaccaccgcagcgaatctggatatccgcatcccgtatgccacagacccggcaggtaaccgcctgcccgacccggagctgcacccggacagcaccctcagcatgtggccggataaccgtatcgcccgtgacgcgcactatctttaccggtatgaccgtcacggcaggctgacagagaaaaccgacctcatcccggaaggggttatccgcacggatgatgagcggactcaccggtaccattacgacagtcagcaccggctggtgcactacacgcggacacaatatgaagagccgctggtcgaaagtcgctatctttacgacccgctgggccgcagggtggcaaaacgggtgtggcggcgtgaacgggacctgacgggctggatgtcgctgtcacggaaaccgcaagtgacctggtacggctgggacggcgaccggctgaccacaatacagaacgacagaacccgcatccagacgatttatcagccggggagcttcacgccactcatcagagttgaaaccgccaccggtgagctggcgaaaacgcagcgccgcagcctggcggatgcgcttcagcagtccggcggcgaagacggtggcagtgtggtgttcccgccggtgctggtgcagatgctcgaccggctggaaagtgaaatcctggctgaccgggtgagtgaggaaagccgccgctggctggcatcgtgcggcctgaccgtggagcagatgcaaaaccagatggacccggtgtacacgccggcgcgaaaaatccacctgtaccactgcgaccatcgcggcctgccgctggcccttatcagcaaggaagggacaacagaatggtgcgcagaatacgatgaatggggcaacctgctgaatgaagagaacccgcatcagctgcagcagcttatccgcctgccggggcagcagtatgatgaggagtccggcctgtattacaaccgccaccgctattatgacccgctgcaggggcggtatatcactcaggatccgattgggctgaaggggggatggaatttttatcagtatccgttgaatccagttacgaatacagatcctctggggttagaagtttttcctagaccattccccttgccaattccatggcccaaaagccctgcacagcagcaagcagatgataatgctgcaaaagcattgacaaaatggtggaacgatacagcatcacaaagaatatttgactctctaatattgaataatccgggactagcattagatataacaatgatagcttctcgtggaaatgttgcagacacagggataactgatcgtgtcaatgacataataaatgacagattctggagtgatgggaaaaaacccgacagatgtgacgtacttcaggaactaattgattgtggtgatattagtgctaaagatgcaaaaagcacacagaaagcctggaattgtcgtcactccagacagtcaaacgataaaaaaagatagcccttgtggaggttcctgcaatgtcaaatacataccagaaaagaaaggcaagtaaagagtatggtttatataatcaatgtaagaaactaaatgatgatgaattatttcgcttacttgatgatcacaattccttgaaaaggatttcatctgccagagtattacagttaagaggtgggcaagacgctgttagattggcaattgagttctgctctgataaaaattatatccgtagagatatcggagcatttatactcgggcaaataaaaatttgcaaaaaatgcgaagataatgtttttaatattttgaacaatatggcattgaatgataagagcgcttgcgttcgagctacggcaatcgagtcaacggctcagcgatgcaagaaaaacccaatttattcacctaaaatagtagaacaatctcaaattactgcttttgataaatcgactaatgtcagacgtgctacagcatttgctatttctgttatcaatgataaagcaacaattccactattgattaatctgttaaaagatccaaatggagatgtcagaaactgggccgcatttgcaataaatatcaataaatatgataatagtgatattagggattgttttgtggagatgcttcaggataaaaatgaggaagtccgtattgaagcaataatcggactttcctacagaaaagataaaagggttttatctgttttatgcgatgagttaaaaaaaaatactgtttatgatgatatcattgaagctgcgggtgaattaggtgataaaacgctacttcctgttttagatactatgttgtacaagtttgatgacaatgaaattataacttccgctattgataagctgaagcgttcatagcgtgagttgcctatgcacagtgggggattcccgccggcacggtgcagatgctcgaccggctggaaagtgaaatcctggctgaccgggtgagtgaggaaagccgccgctggctggcatcgtgcggcctgaccgtggagcagatgaaaaaccagatggacccggtgtacacgccggcgcgaaaaatccacctgtaccactgcgaccatcgcggcctgccgctggcgctcatcagcacggaaggggcaacagcgtggtgcgcagaatatgatgaatggggcaacctgctgagtgatgagaacccgcatcatctgcagcagctcattcgcctgccgggtcagcagtatgatgaggagtccggcctgtattacaaccgccaccgctattatgacccgctgctggggcggtatatcactcaggatccgattggactgaaggggggatggaatttttatcagtatccgttgaatccggtcataaatgtagatccgcaaggtttggttgatataaatttataccccgaaagtgatcttatccattctgtagctgatgagattaatatcccaggcgttttcacaatcggggggcatggtacccccacatctattgaatccgcaacgcgcagtatcatgacagctaaagatctagcatatctaattaaatttgatgggaattataaagatgggatgacagtttggttattttcttgtaatacaggtaaaggacaaaattcatttgctagctaattagctaaagagttacatacaaatgtaataggacctgacacgctatggacgtggtgggggcgaggaactaatggtaagttaaaaatggatacagtgctaacagcaccaacgaaccttaattcaaataaggatctaatggctataacaacaaaagaccttggtaattggataacatatgggccatctgggcaccccatttctaatatgcaaggtacgccagaaaaacccagtgatataagataggttgtagatgtatgaaagcatgcttgttactatttttttatttctcttttatttgtcaattgcatggtgctgatgtgaaaataaaacaaaacgaaagtatgatggggtctacagcaatgacctatgatttaagtgaagaaaagttgatgaaactgaagtataaatcacaacatggtgattcagaggcatcatttcgactatatcaatattactgctttactaaaaataacatttacaaacaattgcgattcttggaaagatcagcatctcaggggaatgttacagcgcagtttaattatggggtctttttatcagatacaaatccaacattatcagaatattataatttgaatagagctatttattggatggaattcgctgtaaataacggtaatattgatgcaaagagcaaacttcaagagctcaaaaagctaaagcgaatggatagaaggaagaataaggagaatccgtaaaagcaatagttcatcagactgccgcagcagtagtatgatgatgaatcagggctgtactataactattatcggtaacattaaccgcagcaggggcggtataacactcaggctccgattgggctggaaggtaggtggaatttttatcagtatccgttgaacccgatttctggaatcgatccccttgggattagccacctgtttatacagcataactttaggtatgctttcgtgtgtttcagatataccatgtgatgataatttttatgatgtgcttagtattccagtcgcttctggtaataatatgcaatgtaaaaataatccccgttgtacacatttataaatagatggccaatacctcaaggcctatggagttggaatgttaatgacccgggagcaagcaatagaaaacctgacggcatacgattagtaccgtcagttaatacaggaacttataatcgcaatggattttcaatacatagttgtttaaacgcttttggtccgtctttaggacctcgattctgttccgagggttgtataactggtttatctaatgacatgcaaaaattaaatgagttaatattttcagagccagatagcacattaacagttacggactaaaaaatatggcaaggttattaacaattgtatttttttctctatttctgcgagtgcagttactgcaagacaatttcagagagagttagatttggcagacaaagcaatattatgggcactaatatcagccagtactaaagagggacgaaaagcgtgttcactaagctattttgcctgtaaggccgcagaggctgaactcggactggcatatatggctgcgaatgataacaaggaatttctcacatccttatctaatataatgaggtacaaaatagatgctggactttccgaatcctatacatgctatttattaagtaagggaaagatcataagaccatatctgaaaaatctaaatccactccaacttgccgctgattgcattgaaacagtaaataaaataaaagataagaataaaaaaaatcattgatataaattcagttaatatttgtagtgatgataaaaatataaaattgagagttaatagtactattatggccattgatgattctataaagtgcatcgatgaatgataacttaattttatttaaaaatatattaataactcactctccaggagtttttttaacttagttttataatgaatacgataattaaaagtgaagaagaaaatagttgtatacatatattccatgaccctacattgtgatctatagattaaatattttttaaatgtgactgtcatccttcagataataaagccatcatcgcaatagatggaaaagcactcctgctcttttttgattagagccgtcgcaggaggaacaactcatatcatcattgcgatctcgacgatgtatagtctcatcctgcggcagaacaagacggataaaaaatccaatgagagcacactcatccagaacttattaacataatgaatattaaagaaaaatcatcgaagctaatgaagtaatatgcaaaaataattagtccttacaaggagcaaagttccataatctcccccctccccctcaatgatccaaataaagataatgcatccagctggtcattcttagcagcactttccgcatcaccgaaacatggctgaaatggtcggagtaaaccgccacctgggcgtagatgccgtcgggtaaggcatcgatatcatcgttagggtccagttcaatggttcccagcacaccgtccgtgccgggcacgaccgttaatgattgcaataccccctgcgcctgataagaaccgcctggcacgacaggtaaaatactagtcagtttgccgtgaaacacctgcccaggtagcgcgttaaacaccacttccgcatcatcgccaggtttcagacgtaacagcgagttttgccgaaattgggcgacaatttgccgtttttgctcggggatgaagaccatcaccggacgcagcggcaaggcagctgcgtatgtacctgggcggatcagtacctgagtaacgtagccattgctcggcgcgcgaatgacagtctgctcaaggttatattttgcttcagtaagttgcgctcttaagctcacaatctgcgattgctcgccgttaaccatactgtcgagctggctctggatctgcgcctgctccgccaccgagcctttcaccagcgcatcctgcgcgaggaaattttgccgcgcatcgtcgatgtcacgttccgagaacggattcaccgccgcctggctgcctttcaagtaacgttgataatttttaaacagacggtcgcgctccgctgaaacctgggtggtgttggcctgcgcttcagtgagctgcgcacgcagcgtctttatattatgcgtcgccgtcatcaggtcagcctgaagtctgtcaactcgcgcctggtaacgaaccgggtcgagcttaaaaagcacctcgcccttttgaataagctgattattcttgtcagtgacttcagtaacaattcccgtcacctgtggcgtgatagggatcgctatcactgccttttgcgcggtaaaagtgtaagggtggttgtagttcatcaacaaaatcaaaccactcaccagaaacacgcctcccagcgccgccgtcgccagcgtccactgatttaccggaatgcggaagattttaaagaccgcccacgccagcgccacgtaagttaaaacaatcaatagatccataattagatctccgggaacgtggaatagtcagtctttttctcggcggcgagttgatgctccagccgggaaattcggtcagaaagtgcggcgatttccgggtcagtcgctttctcctgcgacgcaacatgtgactgcataccccagccacgctccggttgatagagcgtcgcccagatccacagaaacggccagataacatgcagagtaaacaggctcacccagcccgccgtatgaatagcgtcggcatggggatggttgcgctttttggcaatcagataagggatgtcatgtatcgcgatgattccataaaaaatcaccagaaagacgaagatcagcactcccaacgcgaaatagtttagaaacatatctgcctcggattcacgtttatcagtgttgtttttgggctggcagccagaagggagtcaggctgatattttgacaataatccgggttcgcgattctcgccataacaccaaagaataatttttagaggtgatgagttgcttagttacataacgattgtatgacgaaggcataacatgctgtagatcacatcaggtgaacgccgtaagaaaatatcttgtgattcagatcacaaatattcaacaaaccatcaaaacaaaaatgtgacactactcacatttaaatgccatttttagcgaaaatcgccgccttgttgcttttttacacaagcgttttgtgatgaacgtcacgtcaattacctctctaccccctatatttatgtgattgatatcacacaaaaggccgtcgactggacagttaaccgattcagtgccagatttcgcagtatctacaaggtccggctacctctgccgccacattaacaaaaaacctcgggcttccagcctgcgcgacagcaaacataagaaggggtgtttttatgtcatccgatattaagatcaaagtgcaaagctttggtcgtttcctcagcaacatggtgatgccaaatatcggcgcgtttatcgcgtggggtatcatcaccgcgttatttattccaacagggtggttaccgaacgagacgctggcgaagctggtcgggccgatgatcacttatctcctgccgctgctgatcggttataccggtggtaagctggtaggcggcgaacgtggcggcgtagtcggtgccatcaccaccatgggcgttatcgtcggcgcagacatgccgatgttcctcggttctatgattgcaggtccgctgggcggctggtgcattaagcacttcgaccgctgggtagacggtaagatcaaatccggttttgagatgctggtgaataacttctccgcaggcatcatcgggatgatcctcgctattctggcattcctcggcattggcccgattgttgaagccctgtccaaaatgctggctgcgggcgttaacttcatggttgtccatgacatgctgccgctggcgtctatctttgttgaaccggcgaaaatcctgttcctcaacaacgccattaaccacggtatcttctcgccgctgggtattcagcagtcccatgaactgggtaaatcaatcttcttcctgattgaagctaacccaggtccaggtatgggcgtgctgctggcgtacatgttctttggtcgtggtagcgctaaacagtctgcgggcggtgcggcaatcatccacttcctggggggtatccacgaaatctacttcccgtatgtgctgatgaatccgcgtctgatcctcgcagtcatcctcggcggtatgactggcgtgttcacgctgactatcctgggcggtggtctggtttctccggcatctccgggttctatccttgctgtactggcgatgacaccaaaaggtgcttacttcgctaacatcgcgggtgtgtgtgcggcgatggctgtctccttcgttgtctctgctattttgctgaaaaccagcaaagtgaaagaagaagatgatattgaagcagcaactcgtcgtatgcaggacatgaaagctgagtctaaaggcgcatctccgctgtctgctggcgatgtgactaacgacctgagccacgtacgtaaaatcatcgttgcctgtgacgccggtatgggttccagtgcgatgggcgcaggcgttctgcgtaagaaaattcaggatgcaggtctgtcgcagatttctgttactaacagcgcgatcaacaacctgccgccagatgtggacctcgtcatcactcaccgtgacctgaccgaacgcgctatgcgccaggttccgcaggcacagcatatttcgctgaccaacttcctcgacagcggcctgtacaccagcctgaccgaacgtctggttgctgcccaacgccacacggcaaacgaagagaaagtaaaagacagcctgaaagacagctttgacgattccagtgctaacctgttcaagctaggcgcggagaacatcttcctcggtcgcaaagcggcaaccaaagaagaagcgattcgttttgctggcgagcagctggtgaaaggcggttacgttgagccggaatacgttcaggcgatgctggatcgtgaaaaactgaccccgacttatctgggtgagtctatcgcggtgccacacggtacggttgaagcgaaagatcgcgtactgaaaacgggcgtcgtgttctgccagtacccggaaggcgtgcgcttcggtgaagaagaagatgacattgcccgtctggtgattggtattgctgcccgtaacaacgagcacattcaggttatcaccagcctgaccaatgcactggatgatgagtccgtcatcgagcgtctggcacacaccaccagcgtggatgaagtgctggaactgctggcaggtcgtaagtaatccaatcccaccctctccacatggagaaggtggggttaattgcctgatgcgctacgcttatcaggcctacaggatgcatcacaatttgttgaatttgcacgttcttgtaggccggataaggcgcttacgccgcatccggcgctgcccctctcctcacggagagggtttgggtgagggaaaagcctcaccccagccctctcgggtaaaaacattgatgaaggttaatactatgaaagcattacattttggcgcaggtaatatcggtcgtggctttatcggtaaactgctggcagacgcgggtatccaactgacgtttgccgatgtcaatcaggtggtacttgatgccctgaatgcccgtcatagctatcaggtacatgtggttggtgaaaccgagcaggtagataccgtttccggcgtcaatgctgtcagcagcattggtgatgatgtcgttgatctgattgctcaggttgatttagtcactaccgccgttggcccggttgtgctggaacgtattgctccggcaatcgccaaagggcaggtgaaacgtaaagaacaaggtaatgaatccccgctgaacatcatcgcctgtgaaaacatggtacgcggtaccacgcagctgaaaggccatgtgatgaacgccctgccggaagacgccaaagcgtgggtagaagaacacgttggctttgtcgattccgccgttgaccgcatcgtaccgccttcggcttcggcaactaacgatccgctggaagtgacggtagaaaccttcagcgaatggattgtcgataaaacgcagttcaaaggcgcactgccgaacatcccaggcatggagttaaccgacaacctgatggcatttgtcgaacgtaaactcttcaccctgaacacgggtcatgctataaccgcgtacctcggaaaactggccggtcatcagaccattcgtgacgcgattctcgacgagaaaatccgcgcggtggtaaaaggtgcgatggaagaaagtggtgcagtattgatcaagcgctacggctttgacgctgacaagcatgcggcgtacatccagaaaattctcggccgttttgagaacccgtatctgaaagatgatgtagagcgcgtaggccgtcagccactgcgtaaactgagtgctggcgaccgtctgatcaagccactgctcggtacgctggaatatggtctgccacataaaaacctgattgaaggtattgccgctgcaatgcacttccgcagtgaagatgatccgcaggctcaggaactggcagcactgatcgctgacaaaggtccgcaggcggcgctggcacagatttccggtcttgatgccaacagcgaggttgtatccgaggcggtaaccgcttataaagcaatgcaataatggtggaccaggcgcaggacaccctgcgcccgaataacagattgtcagatatgcaggcaacaatggaacaaacccaggcctttgaaaaccgtgtgcttgagcgtctgaatgctggcaaaaccgtgcgaagctttctgatcaccgccgtcgagctcctgaccgaggcggtaaatcttctggtgcttcaggtattccgcaaagacgattacgcggtgaagtatgctgtagaaccgttactcgacggcgatggtccgctgggcgatctttctgtgcgtttaaaactcatttacgggttgggcgtcattaaccgccaggaatacgaagatgcggaactgctgatggcattgcgtgaagagctaaatcacgacggcaacgagtacgcctttaccgacgacgaaatccttggaccctttggtgaactgcactgcgtggcggcgttaccaccgccgccacagtttgaaccagcagactccagtttgtatgcaatgcaaattcagcgctatcaacaggctgtgcgatcaacaatggtcctttcactgactgagctgatttccaaaatcagcttaaaaaaagcctttcaaaagtaagcaacgtctgcttactgcccctctacctgcttcggccgataaagccgacgataatactccagacgttgtagatataacggcacgctttcatcgggtattccggacggaatcgcgttacggggaggaagttttttcagatactcccggaacgcctggcttgatgccatgaaatctacggctttatcgataagaagcggaacgttttcacctaatttgcccatgatgatatctccgtattaccccgcgccgggaatgcgcggccgccaattttagtttaggttcccggtaaagatgacattaaggaaaacgtgctgaatcctcaataatcatccgctgctgtttattatcttttttctatagatttcttaattaatcaacgaattgcgcagtttttgagcatgttaatgattacgttacagaactattacaatgtcattagttgtgaacaaagcacctggtcgcgcatactaggggctataaatttatctttatcagaagccatcacatgaaagaagtcgaaaaaaacgaaatcaaacgcctcagcgatcgcctggacgccatccgccaccagcaggccgatctttcgctggttgaagccgcagacaaatatgccgagctggaaaaagagaaagccacgctggaagcagaaattgctcgcctgcgtgaagttcatagccaaaaactgagtaaagaagcacagaagctgatgaagatgccattccagcgcgcaattaccaaaaaagagcaggctgatatgggcaagctgaagaaaagtgttcgcggactggtcgttgtgcacccaatgaccgcactgggccgcgaaatgggcctgcaggagatgactgggttttcaaagaccgcgttttaagaacacagtatctacagggtgattctgcacattcctataggccgagtaaggtgttcacgccgcatccggcaagataaggcgctctggatcaacaacctaagggcaattctctgatgaggattgcccttttctttaccagacatctccccccacaagaattggccctaccaattcttcgcttatctgacctctggttcacaatttcccaattaaaactcacatcaatgttgccaatacataacatttagttaaccattcattgtcattatccctacacaacacaattggcagtgccacttttacacaacgtgtgacaaggagatgagcaacagactcattacacgatgtgcgtggactccaggagacctgcaatgaatctctggcaacaaaactacgatcccgccgggaatatctggctttccagtctgatagcatcgcttcccatcctgtttttcttctttgcgctgattaagctcaaactgaaaggatacgtcgccgcctcgtggacggtggcaatcgcccttgccgtggctttgctgttctataaaatgccggtcgctaacgcgctggcctcggtggtttatggtttcttctacgggttgtggcccatcgcgtggatcattattgcagcggtgttcgtctataagatctcggtgaaaaccgggcagtttgacatcattcgctcgtctattctttcgataacccctgaccagcgtctgcaaatgctgatcgtcggtttctgtttcggcgcgttccttgaaggagccgcaggctttggcgcaccggtagcaattaccgccgcattgctggtcggcctgggttttaaaccgctgtacgccgccgggctgtgcctgattgttaacaccgcgccagtggcatttggtgcgatgggcattccaatcctggttgccggacaggtaacaggtatcgacagctttgagattggtcagatggtggggcggcagctaccgtttatgaccattatcgtgctgttctggatcatggcgattatggacggctggcgcggtatcaaagagacgtggcctgcggtcgtggttgcgggcggctcgtttgccatcgctcagtaccttagctctaacttcattgggccggagctgccggacattatctcttcgctggtatcactgctctgcctgacgctgttcctcaaacgctggcagccagtgcgtgtattccgttttggtgatttgggggcgtcacaggttgatatgacgctggcccacaccggttacactgcgggtcaggtgttacgtgcctggacaccgttcctgttcctgacagctaccgtaacactgtggagtatcccgccgtttaaagccctgttcgcatcgggtggcgcgctgtatgagtgggtgatcaatattccggtgccgtacctcgataaactggttgcccgtatgccgccagtggtcagcgaggctacagcctatgccgccgtgtttaagtttgactggttctctgccaccggcaccgccattctgtttgctgcactgctctcgattgtctggctgaagatgaaaccgtctgacgctatcagcaccttcggcagcacgctgaaagaactggctctgcccatctactccatcggtatggtgctggcattcgcctttatttcgaactattccggactgtcatcaacactggcgctggcactggcgcacaccggtcatgcattcaccttcttctcgccgttcctcggctggctgggggtattcctgaccgggtcggatacctcatctaacgccctgttcgccgcgctgcaagccaccgcagcacaacaaattggcgtctctgatctgttgctggttgccgccaataccaccggtggcgtcaccggtaagatgatctccccgcaatctatcgctatcgcctgtgcggcggtaggcctggtgggcaaagagtctgatttgttccgctttactgtcaaacacagcctgatcttcacctgtatagtgggcgtgatcaccacgcttcaggcttatgtcttaacgtggatgattccttaatgattgttttacccagacgcctgtcagacgaggttgccgatcgtgtgcgggcgctgattgatgaaaaaaacctggaagcgggcatgaagttgcccgctgagcgccaactggcgatgcaactcggcgtatcacgtaattcactgcgcgaggcgctggcaaaactggtgagtgaaggcgtgctgctcagtcgacgcggcggcgggacgtttattcgctggcgtcatgacacatggtcggagcaaaacatcgtccagccgctaaaaacactgatggccgatgatccggattacagtttcgatattctggaagcccgctacgccattgaagccagcaccgcatggcatgcggcaatgcgcgccacacctggcgacaaagaaaagattcagctttgctttgaagcaacgctaagtgaagacccggatatcgcctcacaagcggacgttcgttttcatctggcgattgccgaagcctcacataacatcgtgctgctgcaaaccatgcgcggtttcttcgatgtcctgcaatcctcagtgaagcatagccgtcagcggatgtatctggtgccaccggttttttcacaactgaccgaacaacatcaggctgtcattgacgccatttttgccggtgatgctgacggggcgcgtaaagcaatgatggcgcaccttagttttgttcacaccaccatgaaacgattcgatgaagatcaggctcgccacgcacggattacccgcctgcccggtgagcataatgagcattcgagggagaaaaacgcatgattatttccgcagccagcgattatcgcgccgcagcgcaacgcattctgccgccgttcctgttccactatatggatggtggtgcatattctgaatacacgctgcgccgcaacgtggaagatttgtcagaagtggcgctgcgccagcgtattctgaaaaacatgtccgacttaagcctggaaacgacgctgtttaatgagaaattgtcgatgccggtggcactggctccggtgggtttgtgtggcatgtatgcgcgtcgtggcgaagttcaggcagccaaagcggcggacgcgcatggtattccgtttactctctcgacggtttccgtttgcccgattgaagaagtcgcgccagccatcaagcgcccaatgtggttccagctttatgtactgcgcgatcgcggctttatgcgtaacgcgctggagcgagcaaaagcagcgggttgttcgacgctggttttcaccgtggatatgccgacaccgggcgcacgctaccgtgatgcgcattcaggtatgagcggcccgaacgcggcaatgcgccgctacttgcaagcggtgacacatccgcaatgggcgtgggatgtgggcctgaacggtcgtccacatgatttaggtaatatctcagcttatctcggcaaaccgaccggactggaagattacatcggctggctggggaataacttcgatccgtccatctcatggaaagaccttgaatggatccgcgatttctgggatggcccgatggtgatcaaagggatcctcgatccggaagatgcgcgcgatgcagtacgttttggtgctgatggaattgtggtttctaaccacggtggccgccagctggacggtgtactctcttccgcccgtgcactgcctgctattgcagatgcggtgaaaggtgatatagccattctggcggatagcggaattcgtaacgggcttgatgtcgtgcgtatgattgcgctcggtgccgacaccgtactgctgggtcgtgctttcttgtatgcgctggcaacagcgggccaggcgggtgtagctaacctgctaaatctgatcgaaaaagagatgaaagtggcgatgacgctgactggcgcgaaatcgatcagcgaaattacgcaagattcgctggtgcaggggctgggtaaagagttgcctgcggcactggctcccatggcgaaagggaatgcggcatagtcgtttgcgccccctcaccctaaccctctccctcagggagaggggaccgttcggcgctgtatgtactccctcactctgaaacgacaccgcactctttttttctccctcgcccctccggggagagggccggggtgaggggaaaaggccgcactgctcaccaattttctgctatcctgcccccgcactaagggggcagtatgctaaacatcgtactttacgaaccagaaattccgccaaatactggcaacatcatccgtctttgcgctaataccggctttcgtctgcatatcatcgaaccgatgggatttgcctgggacgataagcgcctgcgccgcgcggggctggactatcacgagtttaccgccgttacgcgtcatcatgactatcgcgcgttcctcgaagcagaaaatccccagcgcctgttcgccctcaccacgaaaggtacacctgctcacagcgccgtaagctatcaggatggcgattatctgatgttcggcccggaaacacgcggcctgccagcgagcattcttgatgccctgcccgctgaacaaaaaattcgcattccgatggtgccggacagccgcagcatgaatctgtccaatgcggtgtcggtagtggtgtatgaagcctggcggcagttggggtatccgggagcggtattgagagattagttactgtaggccggatagatgattacatcgcatccggcacgatcacaggacattagatcccatccccatactcaaatgtatggttaataccgttgaaatgctggtccatatccattgatggcttatcgctgtctggtttaccgacaatacgagccggaacgccagcggcggtggtatgcggcggcaccggttgcagcaccacggaacctgcgccaatcttcgcgccgcgcccaacttcaatattgccgaggattttcgcgcccgcgccaatcatcacaccttcacgaattttcgggtgacggtcaccaccagatttacccgtaccgccaagcgtcacagattgcagaatcgatacgtcgttttcaatcaccgccgtttcaccaacgacgatgcctgtcgcgtggtcaagcatgataccgcgaccaatttttgctgccgggtgaatatcgacctggaacgtcacagaaacctggttttgcagaaagattgccagtgcgcgacgcccctgattccacaaccagtgaccgatgcgataggcctgcaaggcatgaaaacccttcaggtataacaacggggttgagtatttatcgactgccgggtcgcgggtacgcaccgcctgaatatcacaggccgcagaggcgatcatttccgggtcagcggcgtaggcttcttccaccacttcacggatagcaatagcaggcataattggcgatgacagcttgttcgccagcatgtagctcagtgcactgccaaggttttcgtgcttgagtagcgtcgcgtggtaaaaactggccagcattggctcacagtccgccagcgttctggcttcggctttaatattgttccagacaatttccagttcttcacacgacattgcttactccacacgatgagataatgaccggcccgttctgcgcgggccgggtcatagcggtaacaaaggttccctggggttagtggctgctgcgctcgtccttgcgtgcacgacctagtaaagtcaatgctgcctcgcgcgcgttttttccgcaatataatacttgataaatttcctcggttattggcatttcaacgccgaagcgatgcgccagttcgcggacttctttcgtattgcggtagccttccaccacctgaccaatcttctcctgcgcgctttgtacatccatgccctgaccgagcatcatgccaaaacggcggttacgcgactggttgtcggtacaggtaagcaccagatcgccaagccccgccatgcccataaaggtggcagggtcggcacccagcgccgcaccaagacgcgacatttcagccagcccacgggtgatcagcgccgtacgcgcattcgcaccaaaaccgataccgtcggacatccccgcaccaatggcaataacgtttttcaccgcgccgccaagctgcacgccaatgaaatccggattgctgtaaacgcggaaacttttgccgcagtgcagcagctgctggagatcatcggcaaaggtctgatcggtcgaggccagcgaaatagctgtcggtaaacctgccgccagttctttcgcaaacgttgggccagagataaccgccagcggaatttgatcgcctaaggcctcacgcgccacgtcctgtaacagacgtccggtttccgcttccagccctttggtcgcccacaccagacgcgcatcaggacgcatcagtggtttaatctggcgcagcacttcaccaaagacatggctgggtacgacgacgagaatattacggctggctgccagcgcagtggcgagatcgctttcaagatggagcgtatcgggaaaaggcacatcggggagaaacgcggcgttacagcggtcgcgttcaagcgttgcgatatgttcagggtcatggccccagaggacaacctcgtggccatttcttgccagggtgatggcaagagcggtgccgtacgagccggcaccgatcacagtcattgaagcattacgttggttcatcaggcatcctgatgttcttcagtaccttcgccagcctgctgctgcaaatagttcatgaacagcgcatcgaagttaaccggcgcaaggttcagttgcgggaatgtaccgcgggataccatgctggtgatgcactcacgagcatacgggaacagaatgttcgggcagtatgctcccaggcaatgcgccatctgggtgccttcgatacccgcgatggagaaaataccgccctgctgaacttcacacaggaacgcggtttcttcgcccaaagaggccgttacggtaacacgcagtaccacttcgtatacgtcatctgccagttgggaagatgccgtatccagatcaagtttaacttctggttgccaatctttctggaaaacgtgcggcgcgttcggcgcttcgaaagagatatccttggtataaatacgttggatctggaaagtcatttcagtgttgttttgttctgacatgtgtagaaaacccttaagtgttgtccttaaatactgcgcaatgtaatgccaacgttcacacgttatttcagcaggggatccagtccaccacgtgcatccaatgcatacaagtcatcacagccgccaatgtgctgtgcgtcaataaaaatctggggaaccgtggtgcgaccgctgcgtttgatcatctcttcacgcttggcggcgttgccatcgatcggcagctcctggaaactcacgcccttgctgctcagcagtgcttttgcacgatggcaatacgggcaggtttctttggtatagatttcaacattggccataaattagctcctgtttttttaccctgaaatttcatgttgcagggcggcagcaaaatggagtgtccccagaagcttataacaataagtcgctgggggcctaattgcagctaacggcctgcatcatgaaagacgacaggtaaattatttgccgcgcaccaaaggcaagttttcgccagcccagccagcgacgccttctttcagcacgaatacttgcgcaaaaccagctttcgtcagtgcgtttgcaggctcctggcactgcatgccagaaccgtctaccacgataaccggtttgtctttgtgcttctcaagctcaccaacattgttggctttgatttcgctcggcaacagattaatagaacctgcgatatggcctttacggaagtcatcacgctgacgtaaatccacaaccacagcgtcttctttgttgatcagacgcgtagcttcaccacgagtaatcaccttcactttcgaggtcaggctcttaaacgtagtcacaagaaccgccaccagtaacgcgatccaggcgatactcagtatgggatgacggccaacaaattgcataatttcttgcatggggggtaacaactcccgacgtagtgattaaaaaaaccaggaaaggagtatacctgcgcggtgcggcaaatacagccagcgcgttaactggaatgcaattttgcggggcgcgacgaaaaaaaagcgtaaatctggcatcggcttgccgcgagcggtcgtatattttgatcttcagaggctattttatcgattcagctgtagtaaaattacgcaaattttgactcttgagtatgaggttgtcgcaatgttggtttctaaaaaacctatggtactggtgattctggatggctatggctatcgcgaagaacagcaggataacgccatttttagtgctaaaaccccggtaatggatgcactgtgggccaatcgtccgcataccctaatcgacgcttccggtctggaagtcggtctgcctgaccgtcagatgggtaactccgaagtaggccacgttaacctgggtgccggccgcatcgtgtatcaggacctgactcgtctggacgttgaaatcaaagatcgcgctttctttgctaatccggtgctgactggcgcggtagataaagcgaaaaacgcaggcaaagcggtacacattatgggtctgctctccgcaggcggcgtacacagccacgaagatcacatcatggcgatggtagaactggcagctgaacgcggcgcagaaaaaatctacctgcacgcattccttgacggtcgcgacactccgccgcgcagtgctgaatcctcgctgaaaaaattcgaagaaaaatttgccgcgctgggcaaaggccgcgtagcgtccatcattggtcgttactacgcgatggaccgcgataaccgttgggatcgcgtagaaaaagcttatgacctgctgactctggcgcagggcgagttccaggccgataccgccgttgctggtttgcaggctgcttatgctcgcgacgaaaatgatgaattcgtgaaagcgaccgttatccgtgctgaaggtcagccagacgcggcaatggaagacggcgatgcactgattttcatgaacttccgtgctgaccgcgcgcgtgaaatcactcgtgctttcgtgaacgctgatttcgatggcttcgcgcgtaagaaagtggttaacgtcgatttcgtgatgctgaccgaatacgccgctgacatcaaaactgcggttgcttacccacccgcttccctggttaacaccttcggcgagtggatggcgaaaaacgacaaaactcagttgcgtatttccgaaaccgaaaaatatgcccacgttactttcttcttcaacggtggcgtagaagagtcgttcaaaggcgaagatcgcattctgatcaactcaccgaaagtggctacctacgatctgcaaccggaaatgagctccgcagagctgaccgaaaaactggttgcggccatcaagagcggcaaatacgacaccatcatctgtaactatccgaacggcgacatggtaggtcacaccggggtgatggaagcggcggttaaagcggttgaagcgctggatcactgcgtggaagaagtcgcgaaagcggttgagtccgtgggtggacaactgctgatcaccgctgaccacggtaacgctgagcagatgcgcgatccggcaacgggtcaggcacacacggcacacaccaacctgccagttccgctgatttacgttggtgataagaacgtgaaagcggttgaaggcggcaaactttctgacatcgcgccgaccatgttgtcgctgatgggtatggaaatcccgcaagagatgactggtaagccgctgttcatcgtggaataatccctccccatgaggggaaaggcgattaataccatgacacgggccgtgaaaccgcgcaggtttgcaatcaggcccatcatctacgccagcgttcttagcgctggcgtattgttgtgcgccttttccgcccacgcggatgagcgtgaccaactcaaatctattcaggctgacatcgccgcaaaagagcgcgcggtacgccaaaagcaacaacaacgcgcaagcctgctcgcacaattgaaaaagcaggaagaagcgatctctgaagccacccgtaagctgcgcgaaacgcaaaacacgctcaatcaactcaataaacagattgatgagatgaacgcgtcgattgccaaactggagcagcaaaaagccgcccaggagcgcagcctcgccgcacaactggatgccgcattccgtcagggcgagcataccggtattcagctgattctcagcggtgaagaaagccagcgtggacagcgtttacaggcttatttcggctatctcaaccaggcgcgacaagaaaccattgcccagttgaagcaaacgcgtgaagaagtcgccatgcagcgtgctgaactggaagagaaacagagcgagcaacaaacgctgttatatgagcagcgcgcccaacaggcgaaactgactcaggcgctgaacgagcgtaaaaagacgctggcagggctggagtcttccatccagcaaggtcagcaacagttgagcgagctgcgcgccaacgaatcccgtctgcgtaacagcattgcccgtgcggaagccgcggcgaaagcgcgtgcagaacgagaagcacgtgaggcccaggcggttcgcgaccgccagaaagaagcgacgcgcaaaggcaccacctacaaaccgaccgaaagcgaaaaatcgctgatgtcccgtaccggtggtctgggcgcgccgcgtggtcaggcattctggccggttcgcgggccgacgctgcatcgctatggcgaacagctacagggtgaattacgctggaaaggtatggttatcggtgcttctgaaggtactgaagttaaagcgattgccgacggtcgggtgattctggctgactggctgcaaggctacggtctggtggtggtggttgagcatggtaaaggcgacatgagtctttacggctataatcagagcgcactggtgagcgttggttcgcaggttcgcgcgggccagccgattgcactggtgggcagcagtggcggtcagggtcggccttcactctatttcgaaattcgccgccagggtcaggcggtcaatccacagccgtggttgggaagataagttttgtttccatttcgtcgtaacgttcttgcatttgccgctctgttggcgctctcctcccccgtacttgctggcaaacttgccatcgtcattgatgattttgggtatcgcccgcacaacgaaaaccaggtgctggcgatgccttccgctatctccgtcgctgtattacccgattcaccgcacgccagagagatggcgaccaaagcgcataacagcgggcacgaagtgttgattcatctcccgatggcaccgttgagtaaacagccgctggagaaaaatacgctacgcccggagatgagcagcgacgaaattgagcgcattattcgtagtgcggtcaataacgtgccctatgccgtggggatcaacaaccacatgggcagcaagatgacctctaacctgtttggtatgcagaaagtgatgcaggcgctggagcgttacaatctttacttcctcgacagcgtaaccatcggtaatacccaggcgatgcgcgccgcgcaaggcactggcgtgaaggtgatcaaacggaaggtattcctcgacgattcgcaaaatgaagcggacatccgtgtgcaatttaatcgcgcaattgacctggcgcgtcgcaacggttcgaccattgccattgggcatcctcaccctgcaacggtacgcgtgttgcaacagatggtttataacctgccgccagacattacgctggtgaaagccagcagcttgctgaatgaaccgcaggttgatacttctacaccgccgaaaaacgctgtgcctgatgcaccgcgtaatccgttccgtggcgtgaagctgtgcaaaccgaagaaaccgatagaacctgtttatgctaatcgcttctttgaagtattaagcgaaagcatcagccagagcacgctgatcgtttacttccagcatcagtggcaaggctggggcaaacagcccgaagcggcgaagtttaacgctagcgcaaattaaaggcgctacgcgtaatgcgatggtgcgaccgcgttttgtcgcgccattgccataagcggaaagaccacagtaacgcctggtaaccgaccttcacgctgcgcacattggtaatcaggcgcttatacataccggaagtaaatatctcggcaatcatccgttggcgggtaagaatatccggctctttgcgcaccgcatggcaaacacgcaatgcctcgtaagttatttgctgatgaaattccggataaatcataattttgtcggcataatttcgatttaatttctccagcaggcgggtaatcttaatatagtgacgttgataattaaggtttttattcccttgtctatgcaaccgactcactgacgtattatgcagataatatttatataatgattgctcggtatatcgcgcacgcagcgcgttaaacatgaattctgttgtccagacaatatcctgatgatgtaatccggcaataaatttaatgttatttttaacaataacatcacggcgataaacccccatccagacaacgtgagtccaacggcgcgaagaaagccccatccgcagccagtccgggccggttaatacgccggttgagcgaaggcgatcggtggggatggattgccaggtttctcccgtttcacgaaaacaccagtcagcgttgcactgcgccacgtcgaggtcgtcctctaacgccatggtcatcagcgtttcgtacatggtgggatagacttcatcgtcagcatcgacaaaagcgacatatttgcccgttgccacttcaatcccacgattacgcgccaccgatgcgccagcattcgcctgatgcaacaaacgaacgtgcggatagttttctgcgtaatactttgctatttcaacagaattatccgttgaaccatcgttaataataatgatttccagagcagtccaggtttgcgtaattaaagattccatacaagtgcggaaatcatcgcccgcattatataacggaataataacactaagtttattggtgctgttcatcataaattaccgacgacctctgaagttatcctgacgttttacaggctttgtattaagaaactattaagcctgtgagatattatttttacaggtgagagagtcacttcagggtagagagataatgagagcagctatataagagatcagcacaattacgaactctttattacactgacaggattttacatatttaacagattatcctcagataaaagggctggaataccagcccttgttcgtgttaatcccagctcagaataactttcccggactggcccgaacgcatagcgtcaaagcccttctggaaatcatcgatagagaaacgatgggtaatgatcggcgaaagatcgaggccagactgaatcagcgccgccatcttgtaccaggtttcaaacatctcacgaccgtaaatacctttaatgaacaagcctttaaagatcactttggtccagtcgatagacatatcagacggcggaatacccagcatcgcaatacggccgccgtgattcatggtgtcaagcatggtacgaaacgctggcggcgcaccggacatttccagaccgacatcaaaaccttcggtcatgcctaactccgccatcacgtcattgagattttctttggcgacgttaaccgcacgggtgatacccattttacgcgccagctcaaggcggtattcgttaacatcagtgatcaccacattgcgtgcaccaacgtgtttcgccaccgccgctgccataataccaatcgggcctgcaccagaaaccagcacatcttcgcccaccagatcaaacgacagcgcggtatgcacggcgttaccgaagggatcaaaaattgcggctaagtcatcggaaatattgtcggggattttgaaggcgttgaatgccgggatcaccagatattcggcaaagcagcccgggcgattaacaccaacgcctatcgtgttgcggcacaaatgggtacgaccaccacgacagttgcggcaatgaccacaggtgatatggccttcgccagaaacgcgatcgccgatcttgaagcctttcacttcctgaccaatacctaccacttcaccgacatattcatggcccacgaccatcggcaccgggatggttttttgcgaccactcatcccagttatagatgtgaacgtcagtcccgcagatggctgttttacggattttaatcagcagatcgttatgcccgagttccggtacaggaacgtcggtcatccagatgccctcttccgctttcagtttggataacgctttcatctcacatcctcaggcgataacgcccagttgtttaccaatacgcgtaaatgcttctactgcacgcgtaatttgctcaggggtatgcgccgcagacatctgggtacgaatacgcgcctgacctttcggaacgaccggatagaagaaaccggtaacgtaaatgccctctttttgcagctcacgggcaaatttctgcgccactaccgcatcaccaagcatgaccggaataatggcgtgatcggctcccgccagggtaaagcccgccgccgacatttgctcacggaactgacgcgcgttcgcccacagacggtcacgcagttcgctgcccgcttcgaccatctccagtactttgatggacgcggcaacaatggccggtgccagcgagttggagaacaggtacggacgagaacgctggcgcagccactcaaccacttctttgcgcgccgcggtataaccaccagaagccccgcccagcgctttaccaagcgtaccggtgataatatcgacccggcccatcacatcgcagtattcatgggaaccacgaccattttcaccgacaaaaccgaccgcgtgggagtcgtctaccatcaccagggcatcatatttatctgccagatcgcaaacgcccttcaggttggcaatcacgccgtccattgagaacacaccatcggtggcgatcagcacatgacgcgcaccggcttcacgcgcttctttcagacgtgcttccagctcctgcatatcgttgttggcatagcgatagcgtttagctttgcacagacgcacaccatcaataatagacgcgtggttcagtgcgtcggagataatggcgtcttccgcacccagaagcgtttcaaacaggccaccgttagcatcaaagcaggaagagtagagaatcgcatcttccatccccaggaaggccgccagtttttgttcaagctctttatggctgtcctgagtgccgcaaataaaacgcaccgaagccatgccgaaaccgtgagaatccattcccgcctttgccgccgcaatcagatcaggatgattcgccagcccgagatagttgttggcacaaaagttaatgacgtggcttccatcagccacagtgatatctgcttgctgcgcagacgtaataatgcgctcttctttaaacaacccttccgcccgtgcggtttccagatcgttggttaactgctgataaaattctccacgcattgcgattctccagacagggcaaattccagcacatattacccaaacttataggtcgcgacgagataacgcgttaacacttctgcaaaattcaggataaataacgtgtaacttgatgtctctcaacacctacagatagtagaaaaactgtacagttttggctgggcataatgatgattgattttactgcattgatataaaaagaaaaaatgatgccaaagcatcatttttcctatctcagttggtatcaaaacgctacccactaatggagggaaacctattttcttgaaaggaaaattctcagcgcctgcatttttgcccctaaagtgttactcctgaagcagcgaaacaaatcgaaccattttcctctccccagatagtttaggttgaagagatcggggcgtttgtaatagcacatgacaaaaatgccctggtcatcgtccacaatgttattatttagtgttattttttgactttccagaactaatttatagaattctttccatttatgctgtgaaccaacaattgcgcccccaataatatatacatgattgccaatcatgaaatcaaaaacctgttgttgagatgtgacagtaagccctttttttatagtgaaaagatgcatcttactttcatcaaatgggaaatcccaaattttcaatcctcgagttacatttggcttatggcaatagccaaaatctatccacgcaacaagaggcgttttcactaagcccatgttgatagctttatttacaaaataggccttaaggttacataccaaaacatactctggtgaccagtactctgggttttttaattgtcgaggctcaagtctatttgtaaacgactcatctttttgaattttttcgatacgacttctgatatatctaaatttcttttttatatcgataacgataaccgttgttggttttccgttgcgaatcgcttcaacccttggtttcaaatcgggagaagtgaaaataatcatctcattttcaagtgcggccagacgctcaaagtaactaaaataaacatcaactgaacgagctagtttttcacggaaccctttattagcagtccaatcccctctaccaatgtcaaaatatgcagtgataattgtggtggatgatttcattactaataagaccattaatataaaaaaagaattatatcataaatattaatagaatgtatactgtatattatccattcaaatgcttccgttatttatcatacatcggaatattgatactaaagcactattcacatgcaaaaccaacatccgccatgaaggactagctaaaacccaaactagtttgttgcaattagcatccttgcacctctatgtaaagggctgaagggattcggatgtgatggtatgattacagacattcgtgtctgagattgtctctgactccataattcgaaggttacagttatgatcatcgttaccggcggcgcgggctttatcggcagcaacatcgttaaagccctgaatgataaaggcatcaccgatattctggtggtggacaacctgaaagacggcaccaagtttgtgaacctggtggatctgaatatcgcagactatatggataaggaagacttcctgatccagattatggctggcgaagagttcggcgatgtcgaagcgattttccacgaaggcgcgtgctcttccaccaccgagtgggacggcaagtatatgatggataacaactatcaatactccaaggagctgctgcactactgcctggagcgtgaaatcccgttcctgtacgcttcttccgcagccacctacggcggacgcacctccgactttattgaatcccgcgagtacgaaaaaccgttgaacgtctacggttactcaaaattcctgtttgatgaatatgttcgtcaaatcctgcctgaagcgaactcgcagattgttggcttccgttatttcaacgtttatggaccgcgtgaaggccataaaggcagcatggcgagcgtcgctttccatctcaacacccagcttaacaacggtgaatcaccgaagctgtttgaaggtagcgagaacttcaaacgcgacttcgtctatgtgggcgacgtggctgatgtgaatctgtggttcctggaaaatggcgtttccggcatcttcaatctcggtactggtcgtgcggaatccttccaggcggtagctgatgctacgctggcttatcacaagaaaggccagatcgaatacattccgttcccggataaactgaaaggccgctatcaggcgttcactcaggcagatctgacaaatctgcgcgcggcgggttacgacaaaccgttcaaaaccgttgctgaaggtgtaacggaatacatggcctggctgaatcgcgacgcataagagctctgcatgaaaatactggtgatcggcccgtcttgggttggcgacatgatgatgtcgcaaagtctctatcgcacgctccaggcgcgctatccccaggcgataatcgatgtgatggcaccggcatggtgccgtccattattatcgcggatgccggaagttaacgaagctattcctatgcctctcggtcacggagcgctggaaatcggcgaacgccgcaaactgggtcatagcctgcgtgaaaagcgctacgaccgcgcctacgtcttacccaactccttcaaatctgcattagtgcctttcttcgcgggtattcctcatcgcaccggctggcgcggcgagatgcgctacggtttactcaacgatgtacgcgtgctcgataaagaagcctggccgctaatggtggaacgctatatagcgctggcctatgacaaaggcattatgcgcacagcacaagatctgccgcagccattgttatggccgcagttgcaggtgagcgaaggtgaaaaatcatatacctgtaatcaattttcgctttcatcagaacgtccgatgattggtttttgcccgggtgcggagtttggtccggcaaaacgctggccacactaccactatgcggagctggcaaagcagctgattgatgaaggttatcaggtggttctgtttggctcggcgaaagatcatgaagcgggcaatgagattcttgccgctttgaataccgagcagcaggcatggtgtcggaacctggcgggggaaacacagcttgatcaagcggttatcctgattgcagcctgtaaagccattgtcactaacgattctggcctgatgcatgttgcggcggcgctcaatcgtccgctggttgccctgtatggtccgagtagcccggacttcacaccgccgctatcccataaagcgcgcgtgatccgtttgattaccggctatcacaaagtgcgtaaaggtgacgctgcggagggttatcaccagagcttaatcgacattactccccagcgcgtactggaagaactcaacgcgctattgttacaagaggaagcctgacggatgcgggttttgatcgttaaaacatcgtcgatgggcgatgttctccatacgttgcccgcactcactgatgcccagcaggcaatcccagggattaagtttgactgggtggtggaagaagggttcgcacagattccttcctggcacgctgccgttgagcgagttattcctgtggcaatacgtcgctggcgtaaagcctggttctcggcccccataaaagcggaacgcaaagcgtttcgtgaagcgctacaagcagagaactatgacgcagttatcgacgctcaggggctggtaaaaagcgcggcgctggtgacgcgtctggcgcatggcgtaaagcatggcatggactggcaaaccgctcgcgaacctttagccagcctgttttacaatcgtaagcatcatattgcaaaacagcagcacgccgtagaacgcacccgcgaactgtttgccaaaagtttgggctatagcaaaccgcaaacccagggcgattatgctatcgcacagcattttctgacgaacctgcctacagatgctggcgaatatgccgtatttcttcatgcgacgacccgtgatgataaacactggccggaagaacactggcgagaattgattggtttactggctgattcaggaatacggattaaacttccgtggggcgcgccgcatgaggaagaacgggcgaaacgactggcggaaggatttgcttatgttgaagtattgccgaagatgagtctggaaggcgttgcccgcgtgctggccggggctaaatttgtagtgtcggtggatacggggttaagccatttaacggcggcactggatagacccaatatcacggtttatggaccaaccgatccgggattaattggtgggtatgggaagaatcagatggtatgtagggctccaagagaaaatttaattaacctcaacagtcaagcagttttggaaaagttatcatcattataaaggtaaaacatgctaacatcctttaaacttcattcattgaaaccttacactctgaaatcatcaatgattttagagataataacttatatattatgttttttttcaatgataattgcattcgtcgataatactttcagcataaaaatatataatatcactgctatagtttgcttattgtcactaattttacgtggcagacaagaaaattataatataaaaaaccttattcttcccctttctatatttttaataggcttgcttgatttaatttggtattctgcgtttaaagtagataattcgccatttcgtgctacttaccatagttatttaaatactgccaaaatatttatatttggttcttttattgttttcttgacactaactagccagctaaaatcaaaaaaagagagtgtattatacactttgtattctctgtcatttctaattgctggatatgcaatgtatattaatagcattcatgaaaatgaccgcatttcttttggtgtaggaacggcaacaggagcagcatattcaacaatgctaatagggatagttagtggcgttgcgattctttatactaagaaaaatcatccttttttatttttattaaatagttgcgcggtactttatgttctggcgctaacacaaaccagagcaaccctactcctgttccctataatttgtgttgctgcattaatagcttattataataaatcacccaagaaattcacttcctctattgttctactaattgctatattagctagcattgttattatatttaataaaccaatacagaatcgctataatgaagcattaaatgacttaaacagttataccaatgctaatagtgttacttccctaggtgcaagactggcaatgtacgaaattggtttaaatatattcataaagtcacctttttcatttagatcagcagagtcacgcgctgaaagtatgaatttgttagttgcagaacacaataggctaagaggggcattggagttttctaacgtacatctacataatgagataattgaagcagggtcactgaaaggtctgatgggaattttttccacacttttcctctatttttcactattttatatagcatataaaaaacgagctttgggtttgttgatattaacgcttggcattgtggggattggactcagtgatgtgatcatatgggcacgcagcattccaattatcattatatccgctatagtcctcttactcgtcattaataatcgtaacaatacaattaattaagaataaacaagtttaagaagtgagttaaaactcacttcttatctatacaacttaatctctttactgaattagttaaagtttcagtatcgatatcttttaccgtatatgttggggatactatttgtatagatttatgatgattcggggaccaaattaaatgcgagggatattccggagtacgtgaattagggtaaaatgcaagcgttggtttatgataagccgcagcgatatgaacaagagctgtatcaacagaaatgacaaaatcactatacttggtcaacgcaacggtataaataaactcatcaaatggtagtgtttcgatttcaagtattggtattgtcaataaatcttgcggtaacccggtaaatataatccgataattttcaaagtgtgttttcacttcttgatatataacttttatttgctcaaacgtaagacggcatattttttttgcacctaatggattaataatgactattcttgtatctccaataaattcttttattttatcttcaacatctactggtaaatgcaagtcgtagttggtggaaaatttaccctcaccataaatatgcttcagtatttctattgctcgtgtactcatatgttcttttaaacattcatcgtggggatggtaaaatgaatagtaacgcttataccaatgatcaaaacccagaatgtaagaatcttttaaacttgataatattaagctatgcttaaatgagggcatagtttcaaaggggtctaatacaatatcgaactgtaaatcccgcagatgcttacatagagtaagcatttcaagaaaaccggttgattctttaatacagaactcaaatatatttttattattagagagaaattccccaccctttctatttgtgagaagagttattttaacccctttactataaagttcacgataaatcgaacttaatacaattagatcaccaagtttattattatcatgaataataaggcatgatttaacttgtgctggatctgtaatttgattatttattttattacgaaataaaaaagaaaggaaattaatcttgattttgtttatataaaatcttttctttttgtgaaaagttcctaagcgcatttttataccatattattttagtttcaggatgattaattagcataagaatcggttgaagttctatattgcattttttttcttgtcatatcttttgattcttctgcactgatgtcttgaagtttaataaatggaattacatcgtaagaaatagctgtatcatctgataaattataaatattaatatcttttacattatcatgcataaaacgaaaaaatggcaatattttgaataaatccctacttaattccgagggcatgggatttttattctcatcatagaaacgagaacagctacccgttaaatcaagaccagaacaaataatccgcgcatacttaagtgaatatgcgatttgaattgcagcaaaggcaatagtatggcatgagcaataaccaagactaatgtccttgcaaaatccaaccagacgaccttttttagacaacggtacagagatcagcagttctttgtgaatctgtctcaaaatattaaatttaatcttctttataaaaccacctttttcccgacggtaaaaggaccgtaatacgaggcagttctggaggatataaagtttatcttctttggaagcgtgttcataaacgtcaacgtttactatggtataacgacttctctggctaaatttataaaaatcatcacgacgctgatgtaaaaatcggacatctgtaagtacatatataaaaggaacgatattattacttaacagatattgcgcagaaccattgacagcaataatatcctttgttcgtaatactgacaaaggtgttttttgcgatgtagggcccgaaagaaaaataataacatcatcagatattttattttcaatcaggttttcaacatcttttttgtcaatgtatctaatattcttcatgataaacctgtgaaataaataactccgcttaaaactgtcctggtgaagacatgtaattgtgggattttttttagcgcgctggtttccctttcaaacgccgcataaaattgcgcatttttttacgatatactaaaagataatagcctagatctctaatctcatttttaataccgtaatgacgctctaagtcaatacgatctttcgctttacgctgcgctgaagcacgctttccggagagatcgataattcgaacctcaccattttttataatgaagttaccacgatgggggtcgccagaaaccatgccatgttgatgtaaggcattaattgattgctgaattttattttttagcgcatcatcaatatcgggcatatcacacaactctatgccatcaatatactcgatgatcatgatataagtatggacaaaacgtaaggttttccgttcagccaataaataaaagtcattgagtgtatttaacccttcatttcgtactttttgggtttgctcaaaaaggcgttcgtaataatcaccttttaacagagacttaaagaaacgttcgttacgcttaactttcggagaaaaaaccttaagaatcaatttaccgtaatcggtatcaataagcataacttttgtatcatcaatagaacgaaaaaccttgatgatatttatattataagacaagaagtcatttaatacattgaggtactttgaattgttttcatcggtaaaaacaaccaagtctttgatcttgctcttctgaatcataataaaccagttaaatgttatttacggtaatattttcggcaaagataacagactcctgctataattcctgagatataatgatgttgcactaaaagatgtttatatctttttttaaattcaataattgatttcgcatctcgtggagagtcatctttccagggggaattttctaaagctattttatagtattttaccgatggataaattgcccatttgtgccacggtttagttgcacctgtataatgaataagaagagtactttctgtaatcagctttttatagttttgatgtgttttgtcttttaattcacttttaattgtataaattgtattgtactcacgaggcaaaaataatgtcatccctttcagtaagacattcataacatcctgatcagggtatttataaacattatctttactcataagaatagacaacgctttttctgttagttttgcgtcagcccatttttttaagtctaaataaacgacaccggaattaaagtactgcccaagtaattcaggatcagacaacctggataccgccttttcttgcattggctcaacatctttaacaacagcagcaaccgctccatttaaacccagatgtaatagttggctaatatcgcctttacaaacaacatctgcatcaagataaagcaaacgatcaagcgttaaacccaataattgaaatgcaaataaacggaagtacattgctcttgaccagacctgtgtacaaggcaagcactggagcttatcagtgttaattctatataacgtgattcttaattggttttgctctgcaagctttgcaattttttgaaaaaaaccatcattataaacatcagcaataatataaaaatcaagattaatatgtcgattatttaggacaattgatgtgatggaaacacctacaccatcaagataattagcatcgacaccataggcaacatttaaacattcagaagtatttatattagctagccgaaaatcccaggctttaactttatctatctctatggcaggaaatgagtccacaatgctacccttatatcattactttatagtttcccagttttaatgctttatcttttcaataaaataaaaaagatagttgctaaatccttttagatatctatgctttttaagcatatgttttgcgctatatcttaattgattgctattgttcggtttcagcaacgccgtattcttccatggcgaagcattttttgcctccataaaggcttgtgatacaggataatcccaggcccaatcatgccagggcttggttggcccgatataatggataaaaatagtatcgttggttactgggtttataaagctttctttgagttgataatttaagctgaactgggtgttatatttaatatcagcgaaaataagtttatccgccagcaacatatttaacacatcctgatcaggatgtgttatttttttgattatttctggctcatttagcattgcaatagctcgtgcagaaacctgctgagccgcccattgggcagtattaatcaataaaaaaccggagttaaagtaacctttagcaattcccgcaacacctaacgaatgggcgcgtttttcccaccagtcagcttgcccttctgtaacaaccattgcgactttatcgtcaggaaatgagaaattaattagtggctcaatagtcccctgacaaatgatatctgcatccagataaaggactttaggcgccttattaataaagtaatctgcaataacaaaacgaaaatatattgcatgagtccaattcttagtgctaggcaatgagcgcagtcgatcaccattaatcagatatattttaattctggttttatactgcaacgccagggcatcaaaatacttacgatcatcatcaccaaaataatcagtaaaaatatggaaacacaatcgacttccttcattatattttaatattgaagcaatcgaaattccgcaaccaaatagaaagtttttgtcagttccataagcgatgtccagacaaagattttctgtttctactttatgatcataatcaataactgaattaagaaactcagtttcctggaaaaacacctgctgcattatttcctccgggaaatagcagaaataattaccttatgtaatctatcgtaatacttcgattggtaaaattcatcgatcgacgcaggaattttttcatgttcgatatgaatttcacctgctatatatttatttagaagagttacaaaaccagcaatatctcccggttgatacagatggccattgacatcaggttgaataatgtcagcaggcccggagacacaatcggcactgatacaaggaatcccccacgacaaggcttcaagtagggtcattgggaaaccttcaaaagatgacgtgagcaataacgcactcactttttcaatatcttgctggaccaattcccagggatattgttgccaaccataccagacaattcgatcatcaatatttaattctctaccataagcctggcatttttcgaaatcggagccatcacccaatacatggagtttccagttacctttcgcttgtgataagccatcaagcaggtctttaactcttttctggccttcaaatttcatacgcccaacataaataaacgttgccgtttcaccttcctcgggcgcgggaatgactgagtctttagtttcgacgggattaaaaataacatttatcgtcgattctgctacacctcgattaatcatttgctgtttaatgccagagctgattgctaaatgatagtcggcacaggtgatatattcagcatgttttttgtgatctaaagaaaaatgtggccatgaaaatactggcatatcaattcctgattttttacgtgcttttgcggcaaacaggcaggagatcacatcaatacaaataacgatatctggttggtactcctgaagccatttacttagagcatgaatatgtttcgcccgacgcaaaaaacctaaacgaatattggaaaatgaacatgagtatttaataccttccagccatcccttatccattttgtcattacgacaaaagaaaaacatttcactttggatatgttgttgcctgaaggtagtaataacatcacggatgacagtttccatgccgccaaatccagaaacagcttcgccgataaacgctattttcatagaaactctcattaattgagtaaaactcactgttttaacggttttatttgtctataaaatcagaaacaatcgttgacatcattttatctggactgaatttatataaactatcataatccattggtttaacagatgagttaataaaatactctaacttatcccaatcatcatgacctattataaaaaagcgagattcactatagatttctgaaccaaatacatttatattattagtaattaattttttattgaaaaatagtgcctcaagtatacgaagagtccagccagattggttttctttggttatatcaacaattatattagcatttaatgttcttctaatattctcttcataagatatttgtttttcaatcaaatactttgaagtcgtagatgatgtcttatctttgacaacattaaaatctagcttacatcctagtgttgttaatctctcggctaactcattaattatttgaagacgccctttatcacgaccaaggaaaaaacatattggctggctgttatttttgtcagataaactataatttctaatttcatccattcctataggaaaaaattgttctattgccttgatcttttcattccctataaatctatgctcaaaatcatatataatatcgaaataattcgcgttatcaagaataaaatcttcgccaacagtatttcttagaagcaaaactttatgacagttaatattttttaatatttgtttattgatacctttattaacaacactgtcattaatgataattatgtcatcttttttaatatcattgaggtaatgcttgatgaataatcgccccagccatgcattatccatccctatttttgatatttttttattaatccagttatatttttttggtgttgttatattttttatcttgtacttttttttcaggtactgaatcatttttaattcataatctgcaacccaatttataaaataaatagtcataataaagttagttccagtacatactaataaatatttttataatcctttgcgttgtgttcgctctttaatacgctcggccttaacgcttgccatgttcaataaattctgttcaagagacaatattttgcgtaaaggcatcccaaaataaaccttcataaatcgccagatatctctttgcgtcaggccaatattcattgatgagaaatataaaccaatcaggtctttatcgcgccagcggcgcggtacttttgcacgtatctgtgcccgatgcagatcgataactgaaatttttaattcatcttcccggccagtaaatggcaaatgaagcaaaaagtggcaaatgtaacagtcgcggtgatttatccctgcagtatgcattttacgcaccatagttgctacacgtgcgatcagcatacgcttaacacgtatatcaggcgggttgactgcccaatcggcacaataatcttcaaggctaattgtgggagtgagatcttcggtaataataaatgatgcgcgagttaatggatttaaccctttttcgccaaacccaatgcccttcattgtatcaacgccaacatcactcaggcgatgaatagcgtgccactctctgtctgcgcccaaaacgggcatccgcaatgagagtagattttttataatctcttttaatgtcgtccccttgtgccatttaagaaaatagcttttcccggacagttcaaagcgtaatgtacgacgagtctccagttcacgaaagacctcgccgttcagttttttgacctctgcaaaagcatctttaccacgccaaagtgtggcaagcggctcttttaattcaaccatctaaaccacctgtaatgatatccgcggctttttctggcaagctatacaaatcctgagtatcggcataatggcgagcattctccgcccaggccattcgcaatggcgactgagttaacgctttacgtaaaacttcatttaattgttcctgagagaaaggttcagcgatgaccgttccacaattggcatccgcaatataatgcgcgtacccacataccgctgttgttaaaacaggtaacccagcagtgatcgcttctagaagaacgatacccgcggcttcctgataagcgggatgcagtaataaatcagcggctgccattaattctgacacatcattgcgaccggagaagaaatgcacattgctccgcacgccgagtttttctgccagcgcttcaaattttcgcggcttatcctgaccaacaacaaataaaagcgtattgtgacgtaatgattccggtaacgatgccaaagcttcaattgagcgatctacacctttacggccaaaatctgatccaacctgcagtaataagttttgttgctcttttatgccatttttctggcgataaatttcacggctgtttgggatttgctcactgtattttctgtccggataaataccgggaggaagaatttgaaaacgttcaggttcagtttgataatgcttctggaaatcggcgatttgcttatcggtcagcatcataagtttcgtcgatttaccctgctcgaaagtcgctcgctcaaatgcggcataatggcgatatcgtgatgttaaacgatataaaaaacctttttcttgcgcaactttctcggcgtaacaaacatcagcggcaaaataaacatccaggccaggcatcttattaaacccaacaacgcgatctgcgggatgctctttgagatgattttgtacccaggcataatattctgcattgcgtccatggttggtatgggacttaactggcacctgaataagctcaaatgctttcgggcaatcgccttcccacgactgtgtatatacccgaacatggtggccccgtgcggcaactgttgatgcaatgcgcataaagtcacgttgaagcccaccaaatggaaaatatttatataaacaaaacgccacgatcataattgtgcattcctgtcagctgaaggggcatcttctggcaacagcttttccgtagcggcgatcacatcctccgctgggataacagaaagatattttttgttgcggtcaagttcatgccgggtcggcattttctgataattccccgcccagaattgaataatattctcggtccagggacgccagaatacgtgatccgttgcaccaaatagactaatgactggcgttttcactgccgctgcaatatgtcccggcgcagaatccacaccaataaaaagcactgcatgatcaattaatgcacccagttcaggaaaacgtgttttacctgcaaggccagtaatgggttttgtttcgcaacctcgtgcaatctcatctacacaagcgagatcatctgccgagggcccacaggttagcacaacctgatagcctcgctgttgcagcgcatcgataaccttagaaaatttatcgttatcccaacacttaaatatctgacgcgctgtcggttggatgacaacataatgatcttttacgcccagggcatctaattcccggcgcatcttcttccagcaatcttcggcgtaactcattgttgtgtcggtgtagaaatcggtaatacctaatggctcaaggaccgataaattacgctcaacaatatgtgtaccgtgtattggcgctaagtgtgtgaagctttttttccaaataccatgctgccgatgaccataaagttgcgatattttcatccgtgcaggtaaacaacgtaccagcagcgccaccatccactgatccgtaagattaatgaccaggtcataattattcgcacgcagagtttttatcaacgaaagcacatttttaattttatcgaaagttcccgcacctttattgcttatcccatagagcgcattaatttccgggttttcagacaaaatagggatggtgtcctgataaagcagcatatcgatttttgcatcaggataattctgcttgagcgtactgatgacaggagtagttaataacatatccccatgatatcgcatctttatgaccaggatttttcgaaatggcttttccactagcgactcttttgtgtgattgtctggttaagttaagcagaaaaaagcacgctaccgccccaggctcaacagctacctgaatactgataacgcacttactttgacgtgctagtgtatcatttctttcgcagcaatccgacccgaatgatttttatacacaaaatatactttaatcataaaaatcaaatagataaaaaatagcatttcgataatgtcagtacggcctatgtagatttgaaaatggggccgagtttcaatgaatcgcataaaaatacaaaaaaaatgaagatgtagcggcagatcagaccaaactgaagctatttaagtcaaaaacgggaaaagtaatggtaaagccacagctaaatacatagaatccccagcacatccataagtcagctatttactatgctcgaattgctttacaccgcccttctctaccttattcagccgctgatctggatacggctctgggtgcgcggacgtaaggctccggcctatcgaaaacgctggggtgaacgttacggtttttaccgccatccgctaaaaccaggcggcattatgctgcactccgtctccgtcggtgaaactctggcggcaatcccgttggtgcgcgcgctgcgtcatcgttatcctgatttaccgattaccgtaacaaccatgacgccaaccggttcggagcgcgtacaatcggctttcgggaaggatgttcagcacgtttatctgccgtatgatctgcccgatgcactcaaccgtttcctgaataaagtcgaccctaaactggtgttgattatggaaaccgaactatggcctaacctgattgcggcgctacataaacgtaaaattccgctggtgatcgctaacgcgcgactctctgcccgctcggccgcaggttatgccaaactgggtaaattcgtccgtcgcttgctgcgtcgtattacgctgattgctgcgcaaaatgaagaagatggtgcacgttttgtggcgctgggcgcaaaaaataatcaggtgaccgttaccggtagcctgaaattcgatatttctgtaacgccgcagttggctgctaaagccgtgacgctgcgccgccagtgggcaccacaccgcccggtatggattgccaccagcactcacgaaggcgaagagagtgtggtgatcgccgcacatcaggcattgttacagcaattcccgaatttattgctcatcctggtaccccgtcatccggaacgcttcccggatgcgattaaccttgtccgccaggctggactaagctatatcacacgctcttcaggggaagtcccctccaccagcacgcaggttgtggttggcgatacgatgggcgagttgatgttactgtatggcattgccgatctcgcctttgttggcggttcactggttgaacgtggtgggcataatccgctggaagctgccgcacacgctattccggtattgatggggccgcatacttttaactttaaagacatttgcgcgcggctggagcaggcaagcgggctgattaccgttaccgatgccactacgcttgcaaaagaggtttcctctttactcaccgacgccgattaccgtagtttctatggccgtcatgccgttgaagtactgtatcaaaaccagggcgcgctacagcgtctgcttcaactgctggaaccttacctgccaccgaaaacgcattgaggttgttatgcaaaaacgggcgatttatccgggtactttcgatcccattaccaatggtcatatcgatatcgtgacgcgcgccacgcagatgttcgatcacgttattctggcgattgccgccagccccagtaaaaaaccgatgtttaccctggaagagcgtgtggcactggcacagcaggcaaccgcgcatctggggaacgtggaagtggtcgggtttagtgatttaatggcgaacttcgcccgtaatcaacacgctacggtgctgattcgtggcctgcgtgcggtggcagattttgaatatgaaatgcagctggcgcatatgaatcgccacttaatgccggaactggaaagtgtgtttctgatgccgtcgaaagagtggtcgtttatctcttcatcgttggtgaaagaggtggcgcgccatcagggcgatgtcacccatttcctgccggagaatgtccatcaggcgctgatggcgaagttagcgtagcgtttatgccggatggtatgccatccggcgcgcatgaattacttctggcactgccgacaataaaacgttgcccgctgcgcatgtttagtcgccacaatcggcgtaccgcacacccgacacggctcaccttttcgcccgtaaacctgcaattcctgagcgaaatagcccggtttaccatcactttgcagaaaatctttcagcgttgtaccaccctgctcaatcgaacgcagcaacaccgctttaatcacccgagctaacaattcacactctgccagcgacagtgatgacgccagccgatccggatggatccccgccgcaaacagtgattcgctggcatagatattccctacccctaccaccagcttgttatccatcagccacggtttaatcgccgtttttttcttcgcgcacttctgatgcagatactcaccattgaaatcgtcgctaagcggctccggtccaagatgggtcagcacattatgcccttccagctctttggtccacagccaggcaccaaagcggcgcggatcggtgtagcgcagcactttgccgttgctcatcaccaaatccacatggtcatgcttttcagggggaagttcttctggaaggatgcgcaggctgccagacatccctaaatgaatgataatccagccctcaggcagctccagcagcagatatttagcccgccgctgcacgctaagcactggttggtcgcttaaacggtagatctcttctgaaaccggccagcgcaagcgtccgttgcgcaccactgcatgaagaatggttgcaccaacgagatgcggttctatgccgcggcggctggtttcaacttcgggtaattcaggcatagcatctccaggaatgaacagatgcagtcaatatgggggcaagcagataacaaaaaaccccgccggagcgaggttttttgttacatcaaagcgagaattatttgattttcgcttctttgtagatcacgtgctggcgaacaactggatcgaattttttcagttccagtttttccggcttagtacgtttgttcttcgtagtggtatagaagtgaccagtaccagcagaagaaaccagcttgattttctcacgaatacctttagccatgatttatttcctctaagtacttagtacttttcgccacgggcacgcagttcagccagaactgtatcgatgccttttttatcgattacacgcatacctttagcagatacgcgcagggtgacaaaacgcttctcgctctcaacccagaaacggtgagagtgcaggttcggcaggaaacggcgtttagtcgcgttcagtgcgtgggaacggttgttaccggtcaccggacgcttgccagtaacttggcagactcgggacatgtctattctccaaaaatcaaattagctcgagcttcgtatggggtattggcgcctcgtcaggctttacagcccggtcatcgcagttctatgtgaactctcgattgccaggcccaaatgccaaacccgagattctcaaaggtggcgtagtatacgctgactcagcgatgtgctcaagtcccgaacagacaaagatcccgaaggatcgcgcatagcgggttaaatccagccgcgttcggcaaaagaaacatactctccacgcccaatcacgatatggtcgagcacgcgtaaatccatgaactgacaactctttattatccgttcagtaatgagtttatccgctttactgggttcagcacaacccgaagggtgattatgtgcaaggatcagcgccgaggcgtttatttttatcgcttcgcggataatttcccgaggatggacttcaacatggtttagcgtgccggaaaaaagacgcctatgcgttataacccggtgttgggagtcgagaaagatcaccataaagatctcccgctcctcacccgtgagctggctttgtaaaaattccctcgtcatctccgggctgagtaaagggctttcttcacgcatccgcacgttgtagtaacgccgcgccagttcagcaatcccctttaactgggcaaatttcgccacgccaattccatgaacgccactaaattgttcatattcagaggttaacaagccataaagagagccgaaattctccagcatctcttttgccagggttaatacatctttaccgcgcgttccggtacgcagaaatagcgccagcagctcgacatccgttaaggcgctaataccaaacttcagcattttttcgcgcggcatcaacagctgtgaattgtttttcaccttcacctcctttgtggtgctcgcatcctgtcatagccgtttcgttaaatcgacggccagttttcaatcctggaaagcgcctcgcaaagtgaatctcaggtgaaggcacgacaacaaaagtattgtgataaaatcgccaacttctggtgtcaccctacaggaaaaatcatcatgagcctggccggtaaaaaaatcgttctcggcgttagcggcggtattgctgcctataaaacccctgaactggtgcgtcgtttgcgcgatcgcggggccgacgtccgcgtagccatgaccgaagcggcaaaagcctttatcaccccacttagcttgcaggcggtttctggttatcccgtttccgacagtctgctggacccggcagccgaagccgctatgggccatattgagctgggtaaatgggctgatttagtgattctcgcccctgccacggcagatttgattgcccgtgttgctgccggaatggcgaatgacctggtatcgacgatttgtctggctacacctgcgcctgtagccgtgctccccgccatgaaccagcagatgtaccgtgccgctgccacgcagcataatttagaggtgcttgcttcccgtggtttgctcatctgggggccagacagtggcagtcaggcttgtggtgatatcggtcctgggcgaatgctcgatccgttaaccattgtggatatggcggtagcgcatttttcgcccgtcaacgacctgaaacatctgaacattatgattaccgccggcccgacgcgtgaaccgctcgatccggtgcgttatatctctaatcacagctccggcaagatgggttttgctatcgccgccgccgctgcccgtcgtggcgcgaacgtcacgctggtatcaggtccggtttcactaccgacgccaccgtttgttaaacgtgttgatgtgatgaccgcgctggaaatggaagccgccgtgaatgcttctgtacagcagcaaaatatttttatcggctgcgccgccgtggcggattatcgcgcagctaccgtggccccagagaaaatcaaaaagcaggccacgcagggtgatgaattaacaataaaaatggttaaaaaccccgatatcgtcgcaggcgttgccgcactaaaagaccatcgaccctacgtcgttggatttgccgccgaaacaaataatgtggaagaatacgcccggcaaaaacgtatccgtaaaaaccttgatctgatctgcgcgaacgatgtttcccagccaactcaaggatttaacagcgacaacaacgcattacaccttttctggcaggacggagataaagtcttaccgcttgagcgcaaagagctccttggccaattattactcgacgagatcgtgacccgttatgatgaaaaaaatcgacgttaagattctggacccgcgcgttgggaaggaatttccgctcccgacttatgccacctctggctctgccggacttgacctgcgtgcctgtctcaacgacgccgtagaactggctccgggtgacactacgctggttccgaccgggctggcgattcatattgccgatccttcactggcggcaatgatgctgccgcgctccggattgggacataagcacggtatcgtgcttggtaacctggtaggattgatcgattctgactatcagggccagttgatgatttccgtgtggaaccgtggtcaggacagcttcaccattcaacctggcgaacgcatcgcccagatgatttttgttccggtagtacaggctgaatttaatctggtggaagatttcgacgccaccgaccgcggtgaaggcggctttggtcactctggtcgtcagtaacacatacgcatccgaataacgtcataacatagccgcaaacatttcgtttgcggtcatagcgtgggtgccgcctggcaagtgcttattttcaggggtattttgtaacatggcagaaaaacaaactgcgaaaaggaaccgtcgcgaggaaatacttcagtctctggcgctgatgctggaatccagcgatggaagccaacgtatcacgacggcaaaactggccgcctctgtcggcgtttccgaagcggcactgtatcgccacttccccagtaagacccgcatgttcgatagcctgattgagtttatcgaagatagcctgattactcgcatcaacctgattctgaaagatgagaaagacaccacagcgcgcctgcgtctgattgtgttgctgcttctcggttttggtgagcgtaatcctggcctgacccgcatcctcactggtcatgcgctaatgtttgaacaggatcgcctgcaagggcgcatcaaccagctgttcgagcgtattgaagcgcagctgcgccaggtattgcgtgaaaagagaatgcgtgagggtgaaggttacaccaccgatgaaaccctgctggcaagccagatcctggccttctgtgaaggtatgctgtcacgttttgtccgcagcgaatttaaataccgcccgacggatgattttgacgcccgctggccgctaattgcggcacagttgcagtaatatgacgccggatgacttttcatccggcgagtttctttaaacgccaaactcttcgcgataggccttaaccgccgccagatgttccgccatttccggcttctcttccaggtaagcaatcaggtctttcagggtgatgatagagatcactttgcagttgtaatcacgctcaacttcctgaatcgccgaaatctcgccgcgcccgcgttcctgacgatcgagcgaaatcaacacgccagcaagcgtcgcgccattggcctgaataatctccatcgactcgcgaatcgccgttccggcggtgatcacatcatctaccagcattacgcgtccttgtaacgcgctaccaaccagattgccgccttcaccgtggtcttttgcttctttgcggttaaagcagtacggcaggtccaggtcgtgatgctccgccagtgccacagcggttgtggtggcaatcgggatccctttgtaagcagggccaaacagcagatcgaactcaatgccggaatccaccaacgcttcagcgtaaaaacggcctaacagtgccagatcgcgcccggtattaaacagcccggcgttgaagaaataggggcttttgcgcccggatttcagcgtaaactcgccaaactttaacacctgcttgctaagcgcaaattcaataaactggcgctgatatggtttcatgccttcgctcctcatcttacttttctacagacaaaaaaaaggcgactcatcagtcgccttaaaaatcagtttgccagcgccgccttctgcgtcgctacaatggattcgattccccctcgggccagagccaacaagatgagtagctcttcatgggtgaacggctcgccttctgccgtcccctgcacttcaatgatgcgcccgtcttcggtcatcactacgttcatgtcggtctctgcggcagagtcttcaacgtattccagatcgcaaaccgcttcgccgttcacaattccgacagaaactgcggctaccatccctttcatcggattggttttcagcttgccgttttccaccagcttctgtagcgcatctaccagcgccacgcaggcacccgtaatcgacgcggtacgcgtgccaccatcagcctgaagcacgtcgcagtccagcgtaatggtgaactcacccagcgctttcaaatctactgccgcgcgaagagcacgggcgatcagacgctggatttccattgtgcgtccaccctgcttacctttcgccgcttcacgagcgttacgggtgtgggtagaacgtggcagcatgccgtactctgcggtgatccagccctggccctgacctttcaggaagcgcggcacgccttcttcaatagaggcggtacacaacactttggtatcgccaaattcgaccagcaccgagccttctgcatgttttgtatagttacgagtcagggtaacgggacgcacctgattattgctacggcctgctggacgcatattgaaatctccggcttgaaacaaatgtggctgcgcattatacggacttccggcggttattcctatcctgacaaggcatcgatggctataatccttccacctctccttttataaacaggaacgtctatgatccgcagtatgaccgcctacgcccggcgtgaaatcaagggtgaatgggggagcgcaacctgggaaatgcgctcggtaaaccagcgttatctggaaacttactttcgtctgccggagcagttccgtagccttgaacctgtcgttcgcgagcgtattcgttctcgcctgacgcgcggtaaagtggaatgtaccctgcgctatgagccagatgttagcgcgcaaggtgagctgatcctcaacgaaaaactggctaaacagctggtaactgccgcgaactgggtaaaaatgcagagtgacgaaggggaaatcaacccggttgatattctacgctggccgggcgtgatggcagcccaggagcaggatcttgacgccattgccgctgaaattctcgcggcgctggatggtacgctggacgactttattgtcgcgcgcgaaaccgaaggtcaggcactgaaagcattgatcgagcagcgtctggaaggcgtcaccgccgaagtggtcaaagtccgctcccatatgccggaaatcctgcaatggcagcgtgagcgtctggtcgcgaagctggaagatgctcaggtgcaactggaaaacaaccgtctggagcaggaactggttctgctggcacaacgaattgacgttgccgaagaactggatcgcctcgaagcgcatgtcaaagagacctacaacattctgaagaaaaaagaagcggttggtcgtcgtctggattttatgatgcaggagttcaaccgcgagtcgaacactcttgcgtcgaagtctatcaatgccgaagtgacaaactccgccatcgagctgaaagtgttgattgagcagatgcgcgagcagattcagaacatcgaataactcgtaacgccaattcttacttttccgccttcacaaatgccgccactcaaacagagcggcatttttcttccccgcaacattcaattctgttttgcgtgcctgctccagattttgcgatgtttttttgcccagcacactgagaacgtgagatactcacaactgtatataaatacagttacagatttactttctttgcaattgatatcacatggagtgggcaatgaacgaacatcatcaaccttttgaagagataaaactgattaatgcaaacggagcagaacaatggtcagcaagacaacttgggaaactactgggttattcagagtatcgtcactttatacctgtattaacgcgcgccaaagaagcctgtgagaacagtggtcacacaattgatgaccatttcgaggagatcctcgatatggtcaaaattggctcaaatgccaaaagagcattaaaagacatcgtactctcccgctatgcctgttacctggtagtacaaaacggcgaccctgcgaaaccggtcattgcggcagggcagacttattttgctatccagacccgacggcaggagcttgctgacgatgaagcatttaagcaacttcgtgaagacgaaaagcgtctgtttctgagaaatgagttgaaagaacataacaaacaattggttgaggcagcacagcaagctggggtagcgacagctactgatttcgccatatttcagaatcatggttaccaggggctgtatggtggattagatcagaaagctattcatcagcggaaggggctgaaaaagaatcagaagatcctggatcatatgggttcaacagaactggcggctaatctctttcgagctacccaaacagaagaaaaactcaagcgggatggcgtgaattcaaaacagcaagcaaacaccacacactttgacgtgggtcgcaaggtgaggcaaaccattcaggaacttggcggaaccatgcctgaggagttgccgaccccgcaggtcagcatcaagcagttggaaaacagtgtaaaaattacagagaagaaatagcagaaactaaaaactctttttgttgattgagacacccgatgcgtaagccaaggtccaggtgcagtgaacacaatggctaaatattgcacctttcttttccccctcagttttaacctattttttcttatgcattttctcagacaagaagtcagaagaatgcatctctgctacagaaaatagcgatttcacataactacaagttatcaatttcccctccccttaaaaaatctcaatcgtgacaatgcgcacaaatcgctaccctgccagacagatttttagggagagaaccatgctgttacacattttgtatttggttggcattactgccgaagccatgacgggggcgctggcggccggacgacggcgcatggatacatttggcgtaattattattgcgaccgccaccgcaattggcggagggtcagtgcgcgatattctgctgggccactatccgctcggctgggtcaaacacccggaatatgtgattatcgtcgctaccgccgcagtactcaccactatcgttgctcctgtaatgccttacctgcgcaaagtgtttctggtgctcgatgcgctcggactggtggtcttttctatcatcggggcacaggttgcactggatatggggcacggcccaattattgccgttgtcgcggcggtaaccaccggcgtgtttggcggcgttttgcgcgatatgttctgtaaacgtatcccactggtattccagaaagagttgtatgccggtgtctcatttgcctccgccgtgctgtacatcgcgctgcaacactatgtttctaaccatgatgtggtaattatctccaccctggtattcggcttttttgcccgcttactggcgctacgccttaagctgggattaccggtcttttactacagccacgaaggacactaaggttcaaaacctgtgatctgctgggcagccagccaactgcccagcttcttgatttgcgcattttccttccattcaataacctgtctggcgcgtcccgatccagtccccggcagctgctgccagaactgctccgtgctaaataaaagttgcgaccaggaccgttcatcactggcattaagcgccgcccgggttagcggtattcccattgccatcacccagcgagtaaaaggctgcttacgagccagattaaactgatgccatagctgcgcacttttacttttcgcgatccccggcgtgttctgtaattgctctggcgttaataaaagccaggaaaagatatgttcaaagcgatgagtctgatgcagcgcgcgccaaccggcctcaccaatgccatccagcccaagaacctgttttgcccccagccagactaagcgtgaaatgaactgttcctgacaaacatcagaagcaaagtagcaggtcaacgagttaaagcggttttctggcggtgtcggttttgtacgttctgcaccgcgccacaccacatcatcaatgcgaggaataccctgaccggcaaggctgacgagaatctgatcaccaggcgcaatatcccactcctgccagcgcctgacggaaccaatattcacccgctggacttttttatcatccagcatgacaggtgcgagtgacgcaaccaccgatattttaccgctcttacccaccgcaaactgaattgccttcacttcggcaacctgagctacaggttgatatttccaggccaccagccactctgcctggcccggtagccaatggcgggattctggctctttcgccgctcgtacaactacgccatcggtgacgaagggtaattccgctttccaccactcattgcgtacgcgcgcaacttcatcagcatttttcaccgcacgggtatacgtctgcgttagagtaaaacctgcggtagccagctcttttaaacgatcagacattaactgcggtccatccggccatgcccagacaaaaacgcccagagaattcagcgtgtcgctatcgtcctggcgcatcatcaagccagcaacttttgcgcgggcatttattccccccatttgttgttggatatgcccctcgcgctggagaaatatttccccctgaagcgtactgttggctaaaggcccgctaacggtttgcggcacagcggaaattaagctaactttctgcgtccagtcctcgcctttcaggccattaccgcgactgattgctttgttcagtttcccgtcccgataaaccagggttaccgcaacgccatcaacttttggctgcacccaaagatcgctacgttctcgcatccacagacttaatgcgtttttatccaccattttgcgtacacccgtatgggcaaccggatgcataaccgcaccatttaaaggcggcatcatcacgtcgcggggctcgctcccaaagcagcgttgccactgcgtaagacgggcgcttaactgatcgtaaacaccgtcttccacctcactttttccttccttccagtagtcatcgtcccactgttttatttgctgttgcaggcgggaaatttcttcctgtgctctggctggcgaccaggccggacagaccgcccacacagatgattgccagcacaagatacctattaatatcgccatccatactttcatcatcacctccgctgtagatagtcaggcagatatacaacgtgatgaaagcaaagccgagtggcaaaaacggagtctgcgaggacgcttcctgaaaatcgtctttattgcagtgaatgacaggcaaatgcggaagcagctacgcaaaacgcaacaactttgcgcaaaaagtgtgagcaagggctacgtcacatggccgcgccgtgtataataagctcgtatgtaggctttatttcgctaatcacatacgaaagatactcatggctcaaggcacgctttatattgtttctgcccccagtggcgcgggtaaatccagcctgattcaggctttattaaaaacccaaccgttgtatgacacccaggtttctgtttcacacaccacacgccaaccgcgtcctggtgaagtccacggtgaacattatttctttgttaatcatgatgaatttaaagaaatgattagcagagatgcgttcctcgaacacgcagaagtttttggtaattactatggcacttcgcgtgaggccattgagcaagtactggcgaccggtgtcgatgtttttctcgatatcgactggcagggcgcgcagcaaattcgccagaagatgccgcacgcgcggagtatctttattttaccgccgtccaaaattgaactggaccgccgtctacgcggtcgcggtcaggacagcgaagaggtcattgcaaagcgtatggcgcaagctgttgcagaaatgagccattacgccgaatatgattatctgattgtgaatgatgacttcgataccgcgttgaccgatttgaagaccattattcgcgccgaacgtctgcgcatgagccgccaaaagcagcgtcatgacgctttaatcagcaaattgttggcagactgaacctgatttcagtatcatgcccagtcatttcttcacctgtggagctttttaagtatggcacgcgtaactgttcaggacgctgtagagaaaattggtaaccgttttgacctggtactggtcgccgcgcgtcgcgctcgtcagatgcaggtaggcggaaaggatccgctggtaccggaagaaaacgataaaaccactgtaatcgcgctgcgcgaaatcgaagaaggtctgatcaacaaccagatcctcgacgttcgcgaacgccaggaacagcaagagcaggaagccgctgaattacaagccgttaccgctattgctgaaggtcgtcgttaatcacaaagcgggtcgcccttgtatctgtttgaaagcctgaatcaactgattcaaacctacctgccggaagaccaaatcaagcgtctgcggcaggcgtatctcgttgcacgtgatgctcacgaggggcaaacacgttcaagcggtgaaccctatatcacgcacccggtagcggttgcctgcattctggccgagatgaaactcgactatgaaacgctgatggcggcgctgctgcatgacgtgattgaagatactcccgccacctaccaggatcaggatatggaacagctttttggtaaaagcgtcgccgagctggtagagggggtgtcgaaacttgataaactcaagttccgcgataagaaagaggcgcaggccgaaaactttcgcaagatgattatggcgatggtgcaggatatccgcgtcatcctcatcaaacttgccgaccgtacccacaacatgcgcacgctgggctcacttcgcccggacaaacgtcgccgcatcgcccgtgaaactctcgaaatttatagcccgctggcgcaccgtttaggtatccaccacattaaaaccgaactcgaagagctgggttttgaggcgctgtatcccaaccgttatcgcgtaatcaaagaagtggtgaaagccgcgcgcggcaaccgtaaagagatgatccagaagattctttctgaaatcgaagggcgtttgcaggaagcgggaataccgtgccgcgtcagtggtcgcgagaagcatctttattcgatttactgcaaaatggtgctcaaagagcagcgtttttactcgatcatggacatctacgctttccgcgtgatcgtcaatgattctgacacctgttatcgcgtgctgggccagatgcacagcctgtacaagccgcgtccgggccgcgtgaaagactatatcgccattccaaaagcgaacggctatcagtctttgcacacctcgatgatcggcccgcacggtgtgccggttgaggtccagatccgtaccgaagatatggaccagatggcggagatgggtgttgccgcgcactgggcttataaagagcacggcgaaaccagtactaccgcacaaatccgcgcccagcgctggatgcaaagcctgctggagctgcaacagagcgccggtagttcgtttgaatttatcgagagcgttaaatccgatctcttcccggatgagatttacgttttcacaccggaagggcgcattgtcgagctgcctgccggtgcaacgcccgtcgacttcgcttatgcagtgcataccgatatcggtcatgcctgcgtgggcgcacgcgttgaccgccagccttacccgctgtcgcagccgcttaccagcggtcaaaccgttgaaatcattaccgctccgggcgctcgcccgaatgccgcttggctgaactttgtcgttagctcgaaagcgcgcgccaaaattcgtcagttgctgaaaaacctcaagcgtgatgattctgtaagcctgggccgtcgtctgctcaaccatgctttgggtggtagccgtaagctgaatgaaatcccgcaggaaaatattcagcgcgagctggatcgcatgaagctggcaacgcttgacgatctgctggcagaaatcggacttggtaacgcaatgagcgtggtggtcgcgaaaaatctgcaacatggggacgcctccattccaccggcaacccaaagccacggacatctgcccattaaaggtgccgatggcgtgctgatcacctttgcgaaatgctgccgccctattcctggcgacccgattatcgcccacgtcagccccggtaaaggtctggtgatccaccatgaatcctgccgtaatatccgtggctaccagaaagagccagagaagtttatggctgtggaatgggataaagagacggcgcaggagttcatcaccgaaatcaaggtggagatgttcaatcatcagggtgcgctggcaaacctgacggcggcaattaacaccacgacttcgaatattcaaagtttgaatacggaagagaaagatggtcgcgtctacagcgcctttattcgtctgaccgctcgtgaccgtgtgcatctggcgaatatcatgcgcaaaatccgcgtgatgccagacgtgattaaagtcacccgaaaccgaaattaatgttttatgaacccaacacgttatgcacgcatctgcgaaatgctcgccaggcggcagcctgatctgaccgtctgcatggagcaggtccacaaacctcataacgtttctgcgattattcgtaccgcagatgccgttggcgtacatgaagttcacgccgtctggcctggtagccgcatgcgcaccatggcttcggcagcggcgggtagtaacagctgggtacaggtgaaaacacaccgcaccattggcgatgccgtcgctcatctcaaaggccagggcatgcagattctggcaacccatctttctgataacgctgtcgatttccgcgaaattgattacactcgcccgacctgcattttgatgggacaggagaaaacgggcatcacgcaggaagcattggccctggcggatcaggacatcatcattccgatgatcggcatggtgcagtcgctgaatgtttccgttgcctcagccctcattctttacgaagcccagcgtcagcggcaaaatgcaggcatgtacctgcgtgaaaacagcatgttgccggaagcagagcaacaacgcctgttgtttgaaggcggctatccggtgctggcgaaagtcgcaaaacgcaaaggcctgccttatccccacgtcaatcagcaaggcgagatcgaagctgatgccgactggtgggctactatgcaggctgcagggtaagtgccatgaaaggtcgcctgttagatgctgtcccactcagttccctaacgggcgttggcgcagcacttagtaacaaactggcgaaaatcaacctgcataccgtgcaggatctactcttacaccttcccctgcgctacgaagatcgcacccatctctaccccatcggagaactactgccgggcgtttatgccacggtggaaggcgaagtgctgaactgcaatatctccttcggcggtcggcggatgatgacctgccagatcagcgacggttccggcatcctcaccatgcgctttttcaatttcagcgcggcaatgaaaaatagcctggcggcgggccgccgtgtactggcttatggcgaagcaaagcgcggtaaatatggtgcggagatgatccacccggaataccgcgtgcagggcgatctcagcacgccagaattacaggaaacgctcacgccggtttatccaacaacggaaggcgtaaagcaggccacgctgcgtaaattaaccgaccaggcgctggatctgctcgacacctgcgccattgaagaactcctgccgccggaactgtcacaaggaatgatgacgctaccggaagcgttgcgcactttgcaccgcccgccaccgacgctacagcttagcgatctggaaaccgggcagcatccggcgcaacgtcgtctgattctggaagaactgctggcgcacaacctcagcatgttagccttacgtgccggagcacagcgttttcatgcccagccgctgagcgccaatgacacgctgaaaaataaactcctcgccgccttaccgttcaagccaacgggcgcacaggcacgcgtagtggcggagatcgagcgcgatatggcgctggatgtgccgatgatgcgtctggtgcagggcgatgtaggttccggtaaaacgctggtcgccgccctcgccgcgttgcgtgcgattgcccacggcaaacaggtagcattgatggcaccaaccgaattactcgccgagcagcacgccaataacttccgcaactggtttgcaccgctcggtatcgaagtgggctggctcgccggtaagcagaaaggtaaagcacggctggcacagcaggaagccatcgccagcggtcaggtgcagatgattgtcggtacacacgccatcttccaggaacaggtgcagtttaacggcctggcgctggtgattatcgacgaacagcatcgttttggcgtgcatcagcgtctggcattgtgggagaaaggccagcagcagggcttccatccgcatcagttgatcatgaccgccacgccgatcccccgcacgctggcaatgactgcgtatgccgatctcgatacctcggtgatagatgagctgccgccaggccgcacgccagtgactacggtcgctattcctgatacccgccgtaccgacatcattgaccgcgtgcaccacgcctgcataactgaaggtcgtcaggcatactgggtttgtacgttgattgaagagtcggaattgctggaagcgcaggcggcggaagctacctgggaagagttgaaactggcgctaccagagttgaacgttggcctggtacacgggcggatgaaacctgccgagaaacaggcggtgatggcgtcgtttaaacaaggtgagctacacctgctggttgccacaaccgttattgaagtcggcgttgatgtgcctaacgccagtctgatgattatcgaaaacccggagcgtctgggtctggcgcagttacaccagctgcgcgggcgcgtaggtcgtggcgcggtggcttctcactgcgtgctgctctacaaaacgccgctttctaaaacggcgcaaattcgcctgcaagtgctgcgcgacagtaacgacggttttgtgattgcgcaaaaagatctggagattcgcggccctggcgaattgttaggcacgcgtcagacgggtaatgctgaatttaaagtggcggatttactgcgcgatcaggcgatgatcccggaagttcagcgcctggcacgccatattcacgaacgttacccacaacaggcaaaagccctgatagaacgctggatgccggagacggaacgttactcgaatgcgtaaaaggcggcagtgagaagaccgccatttcaggttaccctaccttcctgccggatgcgattcatcaccctacaaattcaataaattatgaatcaatacgcaggcttgataagcgaagcgtatcaggcatttgtctttgttgcggcggcacttctaccgccgcttcatcggttaaccggcaaaaatcggcaacatcaaatacaacttaattaccagcgcattgacgatatcgataaagaacgcaccgaccatcggcaccaccaaaaacgccatgtgcgacgggccaaagcgttcagtgatcgcctgcatgttggcgattgccgttggcgttgcaccgaggccaaaaccacagtgacccgcagccagcactgccgcatcgtagtttttgcccatcatgcgccaggtaacgaagatggcatacaacgccatgaagatggtctgtaccaccagaatcgccagcatcggcagcgccagcgaagccagctcccacagtttcagccccatcaacgccatcgccaggaacaacgacaagcttacgttacccagcacggataccgcacgctcaaagacgcggtaaaagcccattattgacagaccgttgctcagaatcacgccaacaaacagtacacagacgaaggtcggcagttcaaaagcagtgccagccaaaagttgcgcaacaattttccccaccgtcaggcagatagcaatcagcgcgatagtttcaatcagcaccaacgaggtgatcatgcgtcccacatccggcttttcaaacgccgtcgggacttcctggtcatccggaataccgttcggcgtggtggagtgtttcaccagatagcgcgccaccggaccgccaatcaagccgcccagcaccagaccgaacgttgcacaggccatcgccacttccgtcgcattggtgaagccataacgttcaatgaacaatttactccacgcagcgcccgtaccgtgaccgccggaaagagtaatagaaccggccaacagccccatcagcggatcaagccctaacaagctagccataccaatgccaatggcattttgcatcaccaacagaccaacaaccacaatcaagaagatgccaaccacacgcccaccggcacgcaaactggcaatgttggcgttcaggccaatggtggcgaagaaagccagcattaacggatcgcgcagggacatatcaaagttgacttcccagcccatgctttttttcagtactagtagcgccagcgccaccaacaaaccacccgcaacaggttccggtatggtgtatttcttcaaaaaggagacggaatggaccaacttacgcccgagcagcaacgtcagcgttgcggcaacaagcgttgctaaagtatcgagatgaaacatagttactcctttgtatccgcatcactctttcatactcgtcatacttcatcgcgcagtggcaacttcatgaactatgacgggtatcgagttatgctttcctgggtcaaattctcagctgttaatgaacaaatggcatggattttaagcagaaaaataccaaaagttatataaaaaagtgcatttatctcatttaaatatttagatgaggatgtggcaaacgtttgcttttctctttcggtcagctaaaatgcccgctttgctaccacgggattgttttcgatgtctgtttccaccctcgagtcagaaaatgcgcaaccggttgcgcagactcaaaacagcgaactgatttaccgtcttgaagatcgtccgccgcttcctcaaaccctgtttgccgcctgtcagcatctgctggcgatgttcgttgcggtgatcacgccagcgctattaatctgccaggcgctgggtttaccggcacaagacacgcaacacattattagtatgtcgctgtttgcctccggtgtggcatcgattattcaaattaaggcctggggtccggttggctccgggctgttgtctattcagggcaccagcttcaactttgttgccccgctgattatgggcggtaccgcgctgaaaaccggtggtgctgatgttcctaccatgatggcggctttgttcggcacgttgatgctggcaagttgcaccgagatggtgatctcccgcgttctgcatctggcgcgccgcattattacgccgctggtttctggcgttgtggtgatgattatcggcctgtcgctaattcaggttgggttaacgtccattggcggcggttacgcagccatgagcgataacaccttcggcgcaccgaaaaatctgctgctggcaggcgtggtcttagccttaattatcctgcttaaccgtcaacgtaacccttacttacgcgtggcctcactggtaattgcgatggcggccggatatgcgctggcgtggtttatgggcatgttgccagaaagcaacgaacctatgacgcaagaactgattatggtgccaacgccgctctattacggtcttggcattgaatggagtctgctgctgccgctgatgctggtctttatgatcacttcgctggaaaccattggcgatatcacggcgacctctgacgtttccgaacagccagtgtccggtccgctgtacatgaaacgcctgaaaggcggcgtgctggcaaacggcctgaactcgtttgtttcggcggtgtttaacaccttcccgaactcctgcttcgggcaaaacaacggagtgatccagttgactggtgttgccagccgctatgtcggttttgtcgtcgcgctgatgttgatcgtgctgggtctgttcccggcagtgagcggttttgtacaacacattccagaaccggttctgggcggcgcaacgcttgtaatgtttggcaccatcgccgcctccggtgtgcgtatcgtttctcgtgagccgctgaaccgtcgggcgattctgattatcgcgctgtcgctggcggttggtctgggcgtgtctcagcagccgctgattttgcagtttgcccctgaatggctgaaaaacctgctctcctccgggatcgccgcgggcggtattactgccatcgtgctgaatctgattttcccaccagaaaaacagtaattcactggcggcggtaagataattaccgccgcagtctcacctctttaaccattcccgccttgaggattgcgcgtaaatcgtgcataactcccttatgtgcatttcacgggatggaagaccatgaaatttattgggaagctgcttctctacattctcatcgctctgttagtggcgatcgctggcctctattttcttctgcaaacccgctggggagcagaacatatcagcgcatgggtttccgagaatagcgactatcatctggccttcggggcgatggatcaccgtttttccgcgccatctcatatcgtgctggagaacgtcacgtttggtcgtgatggccagcccgcgaccctggtggccaaaagtgtcgacattgcgctaagcagtcggcaactgaccgaaccacgccatgtcgataccatcctgctggaaaacgggacgctgaatctcaccgaccagaccgcgccgctaccgttcaaagccgatcgtctgcaactgcgtgatatggcgtttaatagcccgaatagcgaatggaaactgagcgcgcagcgggtaaatggcggcgtagttccgtggtcaccaaaagccggtaaagtgctgggtacgaaggcgcagattcagtttagtgccggatcgctttcgctcaatgatgttcctgccaccaatgtactgattgaaggcagtattgataacgatcgcgttacgctgactaacctgggtgccgacatcgcccgcgggacattaaccggaaacgcgcagcgtaacgccgacggcagctggcaagtggaaaacctgcgcatggcggatatacgtctacaaagcgaaaaatcgctaaccgacttctttgcgccattacgctctgtcccgtcgttgcagattggtcgcctggaagtgatcgatgctcgtttgcaaggtccggactgggcggtgaccgacctcgatctcagcttgcgcaacatgaccttcagtaaagatgactggcagacacaggaaggcaaactgtcgatgaacgctagcgagttcatttatggttcgctgcatttatttgacccgattataaacacggaattttccccgcagggcgtagcgctgcgccagttcaccagccgctgggaagggggtatggtcagaacgtcagggaactggctgcgtgacgggaaaacgttgatccttgatgatgcggcaattgccgggctggaatataccttgccgaaaaactggcaacagttgtggatggaaacgacacccggttggttaaacagcctgcaactgaagagatttagcgccagccgcaatctgatcattgatatcgaccctgacttcccgtggcagctcaccgcgctcgatggttacggtgccaacctgacgctggttaccgatcataaatggggcgtctggagtggctcggcgaatctgaatgccgccgccgcgacattcaatcgtgttgatgttcgtcgcccgtcgctggcgctgaccgccaacagcagcacggtgaatatcagcgaactgagtgcatttactgaaaaaggcattctggaagccaccgccagtgtttcacaaacgccacaacgtcagacacatatcagcctgaatggacgcggtgtgccggtgaatattttgcaacagtggggatggcctgaattaccgttgactggcgacggcaatattcagcttaccgccagtggcgatattcaggccaatgtcccgttgaaacctacggttagcgggcaattgcatgccgtgaacgccgcaaagcagcaagtgactcaaaccatgaatgctggcatcgtttccagcggtgaagttacatcgacggagccggtgcggtaaacatcaatctcgccgggtacgactcagacgtacccggcattccatcaatagattacaacgtaattgtcagcgcattcccttgaggcttcaccaccagcccctgctcactttcagcctgcgaaccgtcttgcagaccatttactttcacaacattgcgcaggcacagtgtccagttcttcgcctcgcccgcaccagtcacagtaatcgtgttgccagtacgtgctgcttttaaagtaaagatcaccgatccgtcagcagcgggcacttcacagacggcttcatgcccgtcttgcagattgaagaggtggaatgccgtgccttcgtgccacacgtaatcgggacgttgatcgttgttgcccagcgccagtagagtgttatcacgcacataaacgggcagactcaggaagccgtgctgctgtttatgccagcgactaccgtcgagttcatcgttgtgccacaggtgtgtccagcgaccttccggcaggtagaactgcacatcgcccgcttcagtgaacaccggcgcaaccatcacgttgtcgcctaacatgtattgacggtcaaggtaatcacaagccggatcgtccgggaactccatcatcatggcccgcatcatcggcgtaccccgcgcgttcgcacgcgcagcttcacgatacagatacggcatcatgcggcatttcagttgcgtgaagaagcgcaccacatcacaggactcatcatcgtaggcccacggcacacgataagatttgctaccgtgtaaacggctatggctggagagcaaaccaaacgcgcaccagcgtttgtaaacgtgcgccggagcggtattttcaaagccgccgatatcgtggctccagaagccaaaacctgaaaggccaatagacaaaccaccgcgcaggctttccgccattgattcgtagttagcgtaacaatcgccaccccagtgtaccgggaatttctgcgcaccgacggaggccgagcgggcaaacaagacagcttcttcctcaccaacggtgtccttgagcacgttccacaccagttcgttgtagatgtacgcataatggttatgcattttctgcggatcggaaccgtcaaaccactgaacatcagttgggatacgttcgccaaagtcggtcttaaagcaatcaacgcccatcgcgaccagacctttcagtttgtcggcgtaccatttgcaggcatccggattggtaaagtcataaatcgccagacctggctgccatttatcccactgccatagcgaaccgtccgggcgtttgagtaaatagcctttctcttgtaactctttaaagacgggggatttttgaccgatataggggttaatccagacgcagattttcagtcctttcgctttcaggcggcggatcatcccttccgggtcagggaaagtcagcgggtcccactcaaaatcgcaccactggaaggctttcatccagaaacagtcaaagtggaaaacatgcagcggcagattgcgttccgccataccatcgataaagctgtttaccgtcgcttcgtcgtagttggtggtaaatgaagtggttagccacaggccgaaggaccacgcgggcggcagcgccggacgaccagtaaagcgggtataacgatcaagtaccgctttcggcgtcgggccgtcgataacaaagtattcgagatattcactctcaacgctgaactgcactttggagactttctccgatcccacttcaaaagagacacactggggatgattgaccagtaccccataaccacggttagtcatgtagaacgggatatttttatacgcctgttcagtacttgtgccgccgtcccggttccaggtctctaccgtctggccattgcgcaccagggcagtaaagcgctctcccagaccgtaaactgtttcgccaacgccaagatcaagccgctcaaacatataattgcgttgattattcgtgtcctgcacgtagccattatttttcacctgactaccggtaatacgttcgccgttgcgcagaaaatccagtgaccagaactcacctttgctgacacgcgcgcttaagttgccacttttaaactcagcataacgttctgtgttttcgattgtgaccttcacgtcctgcaaaatattgagcggataatgaggaccgttattcagcgccccctgaaaatgctcaatccgcacaccgacaataccttcctgtggggagaaaaagcgcaacgtaaataaaggcgtatcaagctgccaggtacgttcacgcacatcacggggggcagcatagaccaccatttcattatcctgctgttcaacctcgaacacctgaagcgggtgaatcaaattgaggccaggttgaatcaaccagtttccatcgctaattttcattgccgttccttagttctgcacttcttgagaggtgaattgttgctggcaacggcgtttaccctgagccagctgttccataacggttttcagattgtgcgtcgtgagtgagtagtagcgtttagcgataatcgcgctcagcaaataacagatcgccggaacaatcgtgaatagcgcaataatgatgctaatcgtggcgctgttctgcgctttttctgccgcatcatatccgccataagccagcatccagccgataagagcgccgccgaaggccaaccccagtttgagcacaaacagcgtgccagcaaaactgatcccggtcaggcgtttaccattgcaccactcgccgtagtcgacggtatcggacatcattacccactggataggtgtcaccagttgatgcaacacaccaatcacgaagatgaagacaaacatagtgatgctggcctgcatgggaacaaagaacatcgcgaggctaatcactgccagcagggcgttcgtccaccagaagatagtgactttacatttccagtcggtcagaggttttgccagtgcggaaccaatcaggttacccacgcaataagtggtgagaaaagcgacaaacacttccggcgtgcccaaaatccatgtgacgtaatacatcatcgccccaccgcgtacgcacaccgccaggatattgaaaatggttagtaaaccgacaatccgccactggtcgttttgccagatatcacgtaaatcttcccgcatagacgttgttgtaggtggtgcttcaacgcgttctttagtggtgaagaaacaaaatgccagcatcatgaatgccaccacggaaaggaccgcgataccgccctggaaaccgagtggtttattatcaccgccaattaaattaaccagtggcatcatcagaacagtagaaagcatgcctcccgcggtcgccagcacaaaacgccaggattgcagcgagatacgctgagtcgggtcattggtgattacaccacccaatgcgcagtaagggatattgacgacggtataaagtaaggtaagtagggtgtaagtaattgctgcatagatcattttgccgttcatactgagatctggcgtgctataggccagtacacagacgatcccgaatggcagtgcgccaaacagtacccacggacgaaatttaccccagcgagagcgcgttcgatcggccaacaaccccatgcaaggatcggaaatcgcatccagtgcacgagcgaccaaaaacatggttccgacaaaaccggcaggaatgccaaaaatatcggtataaaagaacatcatatataacattacgttatcgaaaataatgtggctggcggcgtctcccatgccataaccaattttctctttaacggacaacacttcactcttcatctgcttttccttgatgctataggggtgctgagaccgataacgcattttgtaaaccatccctgtgagagcgaatattccgatatctggttattaatttatgattcttgttttatgtgatcgtggtagcgttaattccgctcatatatcattgtaaaatatgggttttatatgaactataatgctttcgtgataatacgctgcgtgtattaggcggaaaaaactgatctgggggatgtagaaactcaaggaagtagctataatgcgccccgcctccatgtagcaatcgaggcgcggaagatcgtcgtctccggtgaggcggctggacttcaaatccagttggggccgccagcggtcccgggcaggttcgactcctgtgatcttccgccaaaatgcctctcctgacgttctccaaccccttgtaatactgtcaatccagatattttctactgctcaatattcaatcggcttcaggaatacctggtctaaggttttgtgatggacgatgagcggctgaagaatccgcctgtcggttcttctgtcctcgaacgcatccgcgatattcacgccagtatgcgccgtgtttatttgcaggtgatttgcccccctgctgactctcagccaactgtatcgccattaaggtgaagatgttgttttactcgccccagaacacccttttttatacgactattctatttctttaaccgctggcgaaaaaaactgactataaacttcaccaataatcagactgccatcaagattaatttgttcatttaatatatcaaatcaacttgttttatttttactatcaaaaatagctcattgccttactataattaatatataaattcggtaattaattcttaacatgcttttactaataatctcaattgctggccctataatattgcgctagcattgctttctggttgtatcagcgatactcaaaaattcttaatacaatactcattcgactggtacttatttgtaactcagttatattttttcgcccggtgattcagaagaatgcaaaaaacggctaccactccatcaaaaatacttgatctcactgccgcggcatttttacttgtcgcctttctgacgggtattgcgggcgctcttcagactcctaccctaagtatattcctcgcagatgaactgaaagcccgtcctataatggtaggttttttcttcaccggtagcgctattatgggaattctggtcagtcaatttctggcaaggcactccgataaacaaggcgaccgtaaattactgattctgctatgttgcttatttggagtgctggcctgcacgctttttgcgtggaatcgcaactacttcattctcctctcaacgggcgtacttctgagtagttttgcttccaccgcaaacccgcaaatgttcgccctcgcccgtgaacacgccgacagaacaggccgtgagacggtcatgttcagtacatttttacgtgctcagatctcgcttgcctgggttatcgggccaccgctcgcttatgaactggcaatgggatttagttttaaagtgatgtatctcaccgctgccatcgcatttgttgtttgcggactgatagtctggttgtttttgccatcaatacaaagaaatattcctgtcgttacccaacccgtagaaattttaccctccacccacaggaagcgggatacgcggctactttttgtggtctgttcaatgatgtgggcggcgaataatctctacatgataaatatgccgctatttattattgatgaactgcatctaaccgataaactgactggagaaatgattggtatcgctgccggtctggaaattccgatgatgttaatcgcaggctattacatgaaacgtattggcaagcgactattaatgctcattgctatcgtgagtggaatgtgtttttacgccagcgtactcatggcgacgactccggcggttgagctggaattgcaaattcttaatgccatcttccttggtattctctgtggtatcggcatgctttattttcaggacttgatgcctgaaaaaataggctctgcgacaacgttatatgcaaatacttcacgcgtcggctggattatcgccggctctgttgacggaattatggttgaaatctggagctaccatgcgttgttctggctggcgatagggatgttgggtattgcgatgatttgcctgctgtttattaaagatatttagctcaccagtctgggctaagaaaaatcggcgtggcgcaaacagagccatcctcgccatttttgctatcatgcctgcatacataaacgacaaaacagtatgcagagggaaaaatgggttccaccagaaaggggatgctgaacgttctgattgccgccgtgttgtggggaagttcaggggtctgcgcgcaatacatcatggagcaaagccagatgtcgtcgcagtttttgactatgacgcgtttgatattcgccggtttgattctactgacgctgtcatttgttcatggcgataaaatcttttctattattaacaatcataaagatgccattagcctgctgattttttccgtggttggcgcgctaactgtacagctcacttttttgctaaccatcgaaaaatcgaacgcagccacggcaacggtgctgcaattcctctcaccgacgattatcgtcgcctggttctcactggtgcgtaaatcgcgcccgggcattctggttttctgcgctattttgacatcgctggtcgggacttttttattggtgacacacggtaatccgacgtcattatcgatctctcctgccgcgttgttctggggcattgcctcggcatttgctgctgcattctataccacctatccctcaacgctaattgcccgctatggcacgttaccagtcgtcggctggagtatgctgattggcggtctgattctgttgcctttttatgccagacaaggaacaaactttgtcgttaacggcagtttgattctggcgtttttttatttggtggtcattggtacgtccctgacatttagtctgtacctgaaaggagcacaattaattggcggtccaaaagccagcattttgagctgtgcagaaccattaagtagcgcgctactctctttgctgttgctggggatcacgttcacattaccggactggctgggaacgctgctgattctgtcatcggtgattttgatttcaatggattcccgtcgccgcgccagaaaaataaatcgtccggcgcggcataagtgagaattaccagccaggcaccgcgccaccgttaaaaatggtttctgccgctttagcgacttcgggtgattgataagattgcagaaattccttcacgttttctgcattcttattatcttcccgtgccaccaaaatattcacatacggcgaattcttatcttcaataaatacgctgtcgtgcaccggagaaagcccggtctgctgaatgtaagtggtgctgataatcgctacatcaactttgggatcatccagtacgcgcgggagctgcgccccctcgagttccataatctgcaaatgacgaggattatcggttatatccagcgcggtaggtaataacccttttccctctttcagagtaattagcttctctttttgcaacagtaaaagtgcgcgaccaaggttggtcgggtcgttggggatcgccactgtcgcgccttcttttatttgcgccacggttttgatttttttggaataacccgccatagggaagacaaacgtatttcccaccgctaccagtttataaccatgcgcctgattatcttgttcaagaaagggtcgatgctggaagacattcgcatcaagttcgccatgatttgtcgcatcgttcggtagcaacgaaccgctaaatcctaccagttcaacatcgaggccatatttctcttttgccacctttttagcgacttccgcgacatcttgttctgcgccatttataacgccaactttaatgtgttttgcatcgctgctactctggtcgcaacctgccagcagaattccggccagcaataatgcggcccctgtccgtagatgatgtgttgtcagtttcatttttttatccttttattaatgattacctgactatagcggtaaggtcgctgcggtttaaaaaacgaaacgctatcgataagaataaaaaggaataaaagtggaatataaagtctggcacttcttactgaccacgcaagcgcgtttcgtacagcatgatgagagcgatgaaagcaaactacacttatgcttcattcgatacacatttgtaaaaggttgaatccatgaaaccaacgacactactgcttattttcacttttttcgctatgccaggcatcgtatacgccgagtcgccttttagctcactgcagtccgcaaaagagaaaaccacggtattacaagatttacgtaaaatttgcacgccacaggcgtcattatcagatgaagcgtgggaaaagttaatgttgtcagatgaaaacaataaacaacatatacgcgaggccatcgtggcgatggaacgtaataatcagagcaattattgggaagcgttgggtaaggtagaatgcccggatatgtaagaacagcaacaactactgaccaacgcttctttacctgatatcaggatttcttcattttcacctttgcagtaaccaacaatgcagtcagcaacatcaatgtgccggacaacatcaacggcgaagtcagaccaatattatccagcgcataaccgccgattgccgcgccacaggtattagcaagctgaataaccgccacctgaatagacccggctttttctgcctgatcggccagcgagcgggtgatccacgttgaccagccgacgggaaccaatgcaaaagttagcccccagataatcgccacgccggtagcaacgattttatcgcttccccacaacgtcagtaccaacgcactcacagccagtattaacggcgcgcctgctaaggccagttttaccgaacgtttaagaatgaacgacgaaagcgacgtaccaataaagctggcgataccaaaactcaacagcaccagcgttaagccatccacgccgaatcccgccaggttcatatacaccgggcgaatatacgtgaagaaagcaaactgcccggcgaaagacatgaagatggcgatcatccctgccatcacacccggacgttgtaataagcggaaagtattttgtttctgatgcgagggttcgcctggcagtgaaggcaatgatttgataatccagaaaatacacagcacgcccatcaccgccgccgcattaaagacattgcgccaaccgataagctcgcctaaaaaactgcccaacggcgcggcaatcaccagcgcaatagaaaccgcgccgaagatcaccgacagcgccttcggcaccgtacgcggcggcaccagacgcatggtcagcgacgccgacatcgcccagaacccgcccagcgccagccccagacaggcacgaccgattaaaagcaaactgaatgagttagcaaaggaaaccagcaagcaggagagcgtcagcaaaacggcaaacaaaataacaacgtagcggcggtcagtagcctgaattgtctgggtaataaacaaactggcaaacattgccacaaaggcggtcacggtcaccgattgcccggcaaccccttccgaaatgcctaaatcctgggccattggcgtcaacaaactgacgggcaaaaactcaacgataatcagacaggcgacacaaaacgccaccgagaaaacggctgaccagttcggtcgggtgatggcatccgcgccgcggttttcggcaataaattcactcatggtgttacccgtggcatgtttcaggggaaaagccgaccactttaacattgaaatgtgtgacgcatttaacgtttttgcaacttttacggtgttgcttgagctggagttaagatcgaaacggaacagggcaaagattaccggatgcggcgtgaacgtcttatccacccgacaggtcaggcgcggtctgtaggctgataagacgaaacggtttcaatgcaaccagtgaacgccctcggcaggctgaaagaacgcgttatagcgcatctgaaaagcattaatatcctgcatttcaggttcggtttcgcgcagaaaacctagcgccagcctgacctgagcgtcggtaatcggcgcggcgaggcgagctttttgtaaaatccgatgccattgcagcaggttctgttcgctaccatcgacaatgacaatttgccagatgagcaacacctgcgcggcgttttgcaggtgcgactcatccggacgatgcaaataacgtaaaaattcgtcaccagctgactttcccatttgatcgaccatcgactccacgggtacgacatcgatgttcagccgatcgctgagacggcgaatcgcttttctggccccggatgtcagcacccgaaaaccaaccacaaacactaccgccagcgtggcgagcattatccagatcatgagttctcctgcgtaatcagaactcatgatatctggaaaccctcgccagttactaatccaccagaataatcttcagtgcaaacagagctgcgaccaccaccacacacaggttcagatcgcgccagcgcccggtgcatactttcatgatgcagtacgacataaagccgagtgcaatcccttcggtgatcgagaaagtaaagggcatcatcaccgtggtaataaacgcaggcaccgattcggtaaaatcatcccagttaacgcgcgccaggctcgaagtcatcagcacgccaacaaagattaacgctccggcggttgcgtaaggaggaactatcgccaccagcggtgagaagaacataaccaacaggaacataacgccaaccacaaccgcagtcagccccgtgcggccaccgactgccacaccagaagtactttcaatataggcagtaacagacgaggtgccgataaacgcacccgccaccgaactgacgctatcaacatacagcgccttattcatattggggaatttaccgttaccatctattaagcccgctttatcagttacaccaattaatgttcctgatgaatcaaataggttgatcagcataaaggagaaaatgataccggcgagttcaagtgttaacgcgccgctcaaatctacttcaccaatgacgccgctaatatcaggcggaatggaatagacgccgctaaaatgaacatcaccgaaaaataatccacagcaagacgtcaccacaatagaaaccagcaccgcggcatgaaaatgacgtgatgacaacacggttataataaaaaaccctaaaatacctaacaacacgccgtgagaacttaaatcgccaatcatcaccagcgtgtctttattggcgacaataacgccagtattttttaatcccattaaggcgataaataatccaattccgctggtgataccaatacgtaaacttaagggaatgttggagatcatccagtaccggatacgaaacagcgtgagcaaaaatagtccaactgcgccccagaatattgcgcccatcccggtctgccaggagatgcccatcgcccccacgaccacgaaggcaaagaaggcgttcagccccattgccggagccagcgccacgggtaagttagcaaatatccccatcgcaatactgccgataccggcaatcaaacaggtggtaacaaacaccactttcgggtccatttgtgccgcgccgaggatttgcgggttcacaaaaacgatgtacaccatggttaaaaaagtggtcatccccgcaatcaattctgtgcggacggtggtcccatgctgaggtagtttaaataatcgcgaaagcgtccctgattcattactcacgtaatcggtattgtcattattcatttttttgtccattggaggagatttaatcccttgcttttgtaaaacaaatgacaacaacggttcagtgataattatcacatttcaattgcacattaatggatattctttaataatctcgcgacgtttctttatgataaataataatcaaattgataaaatcaaaatgagaaaaatatgaataattctattaaccataaatttcatcacattagccgggctgaataccaggaattgttagccgtttcccgtggcgacgctgttgccgattatattattgataatgtctctattctcgacctgatcaatggcggagaaatttccggcccaattgtgattaaaggacgttacattgccggtgttggcgcagaatacactgatgctccggctttgcagcggattgatgctcgcggcgcaacggcggtgccagggtttattgatgctcacctgcatattgaatccagcatgatgacgccggtcacttttgaaaccgctaccctgccgcgcggcctgacgaccgttatttgcgaccctcatgaaatcgtcaacgtgatgggcgaagccggattcgcctggtttgcccgctgtgccgaacaggcaaggcaaaaccagtacttacaggtcagctcttgcgtacccgccctggaaggctgcgatgttaacggtgccagttttacccttgaacagatgctcgcctggcgggaccatccgcaggttaccggccttgcagaaatgatggactaccctggcgtaattagcgggcagaatgcgctgctcgataaactggatgcatttcgccacctgacgctggacggtcactgcccgggtttgggtggtaaagaacttaacgcctatattactgcgggtattgaaaactgccacgaaagttatcagctggaagaaggacgccggaaattacaactcggcatgtcgttgatgatccgcgaagggtccgctgcccgcaatctcaacgcgctggcaccgttgatcaacgaatttaacagcccgcaatgcatgctctgtaccgatgaccgtaacccgtgggagatcgcccatgaaggacacatcgatgccttaattcgccgcctgatcgaacaacacaatgtgccgctgcatgtggcatatcgcgtcgccagctggtcgacggcgcgccactttggtctgaatcacctcggcttactggcacccggcaagcaggccgatatcgtcctgttgagcgatgcgcgtaaggtcacggtgcagcaggtactggtgaaaggcgagccgattgatgcgcaaaccttacaggcggaagagtcggcgagactggcacaatccgctccgccatatggcaacaccattgcccgccagccagtttccgccagcgactttgccctgcaatttacgcccggaaaacgctatcgggtcattgacgtcatccataacgaattgattacgcactcccactccagcgtctacagcgaaaatggttttgatcgcgatgatgtgagctttattgccgtacttgagcgttacgggcaacggctggctccggcttgtggtttgcttggcggctttggactgaatgaaggtgcgctggctgcgacggtcagccatgacagccataatattgtggtgatcggtcgcagtgccgaagagatggcgctggcggtcaatcaggtgattcaggatggcggcgggctgtgcgtggtacgtaacggccaggtacaaagtcatctgccgttacccattgccgggctgatgagcaccgacacggcgcagtcgctggcggaacaaattgacgccttgaaagccgccgcccgtgaatgcggtccgttacccgatgagccgtttattcagatggcgtttctttctctgccagtgatccccgcgctaaaactaaccagtcaggggctatttgatggcgagaagtttgccttcactacgctggaagtcacggaataataaaaaaagcccggcgtcatgccgggcaaaagtcaccagttacgtttatgccactgtcaactgctgaatttttttctcgcggcggattttgcgttcttccattaccgccactatcgccatcaggcagatacaaccaatcgcggcgatatccagcgcggcgaaggtgcctgcccagccggtaaggccgaataccggcgtcccatcggcaatcattcccagacctaacttggcaaagctgtcaccaatcaggtaagcaaaggtgcctttaataccatcggcagcgccaatcgcttttttaggtacaaagccaacagcagccacaccaatcaacaattgcgggccaaagaccaggaaacccaacgcaaagagagaagccagatagatatattcgttactggcatgttgatacacaccgagcgtggcgataatcagcgccagcgcgatgcaggccaccaggccacggcgaccgttcgccaggtcagagagccagccccacagcagcgtaccgaccagcgcaccagcttcaaacagcgtaaagccctgaatcgccaccgctttagagagtttcagttcctggaacgcgtatacggttgaccactggtcgataccaatacgtaccacatagaggaaaatgttggcgaagcacagcagccagatcactttgtttttcagcacatactcaacaaagatctgccacttggtcatatcggtagattctgtctctttgtcctcttcgctgatctcctcgccgaacagttcttcagctttgccgaggccataagattccggggagtcgctgccgtaacgcaggccgataaaaccgacaatcagcgcgataatcgacgggaagataaacatgccgatgacatggccatcgaacaggtaatttgccccgaacagcgccacacctgctgcgcctgcaccgccaaggttgtgagaaatattccagaaaccgaggaatgtcccgcgtttacgacgcggcgtccatttggtgatggtggagtaactgcacgaaccgccggtactctggaaaaagccgcttaaggcgtagaaggcaatcatcaggaacaggctaaccgagccgctgcccatactggcactgaagcccagcatacaaatagcagagaggatcagcatgaacggcaggaattgtttggtgtttttgccgtcggcgtagtaggaaaccagcgttttacccacgccataagtgatggagaaacccaggccgatcatccccagctgcgtcatgctcaacccgtaggtcgaaatcatatcgttctgcgcgatgttaaagttcttgcgaatcaggtacatcgtcaggtagccgataaagaccaccaggtaggattgcatgaacggtttgaaccacattttgcgccgcacttcgagcggaaggtccagggtcggcttgcgaacctggtttaagaaagccagcatgggttactcctgaaatgaatacctgcgtgaggcatgcattgtaaaaatcagcagcaaatcaggcctgagatagcgtccaggcaaaacctggaaaatttcttagttttgccggatatgaagtgaaaaggtgagatgcatcacgcttcgcgcggtgtctgggcgttcaaaaagggcagtaacagcagtgcggaaatcccggcggcgatagagataaccacaaaaaatccgctccagtgccaggtatcgagtactttcgccagcggccaaccagcaagcgacgcccccagataagcaaacaagccgacaaaccccgtcgccgcccctgccgcctctttgtgggaacactctgccgccgccataccgattaacatctgtgggccaaagacaaaaaaaccaatggtgaagaagcaggttgcctgcatcacgtagctggcaaatggcatcagccacagggagccgactgaaagcaaaattccggcggcgaaaatcaaattcatcggccctcggttgccgttaaacaatttgtccgagccccaaccggctaccagcgcaccgataaatccgcccagttcaaacatcgtcactgccgtattcgccgtgaccagatcgacgcccagtgtctcggacatatacaaattgccccagtcgttgatcgccgcccggaccacatagaccagcacatagcaaaacgaaagcagccagatatacggattcagcaacacatatttggtgaggatctctttacgcgtcaaccctgccccttcttgttgttgagcaatttccagcgcgtcgtgtcgccattcaccgaccgccggtaaacctaacgcctgcgggcgatcgcgtagccgccagcagagaaaaatccccacgactatcgccatacaaccagcaatcatcatcccggcacgccagccgtaatgcagcgcagccgctgccatcacaatgggaatgagtgcgccgccgacgttatgcgccgtgttccataatgcccaccaaccgccgcgctcggtacgtgaataccaggccgttaacagacgcgcacacaccggtgaaccccagccctggaaaaaggcgttcagcacccagagcacggcaaacgcccatagcgacgtcgagaagccaaacagaatgttgataatgcccgtggcgataagccctatccccataaaataacgggcatttgagcgatcgctgacaatgccggagacaaacttcgacacgccataggtaatgtaaaacagggtcgctaacaggccgatatcgctacggctgagcacgccgttagcaaggatttctggtacggcggcgttaaaacttttccgcgtgaagtaaaacagcgcgtaacccagccagatggtcagcagaatatgccgacgccagtagcgatagcgggcatcaatttcatatttatcagtcattaatggcgcatcggcaggcgctttcagaaacggcaacatcatcaaaccttagacatagcgttgaggtagagaaacgctgacacgcgtgccgtgcagacaggaaatgtgtaatgtgccacccagcgccgttacgcgctcgcgcattccggtgaggccaaaaccttgttgcccggaacccggcggcaaaccgctgccatcgtcttcaataaccagcatcaaccgttcatcctgctgccagccttgcagggtgaccgcgctggcatcagcatgtttcacaatgttgttcagcccttcctggcagacacgaaacagcgtcacgcgctggttttcgcttaacgctgattcatcgattcgccattcgagatggctgacaataccgcgcccttccagctccatttcccgcatcagtgagcggatggcctgctccagggtgagatcatccaactggcgcggacgtaaccgacccaacaaacggcgcaccgcgtcgtaaacgcccagcgatagttgttcgatgagctgcccgctctgcttcacgctggcgttatctgccgccagccgctgaacaatgcccgcctgagtacgaatagcagtgatggtctgaccgatatcatcatgcagctcacgcgccacatcacggcgcacgctctcttcggtttccagcaaccgttcagccagatgctgattgcgcgccagttccttttgcagcgactggttaagttcacgcaaccgctggatgccagcgccaagcaacaaccctgtcagactttgcaccagcagcgagagcaataaatccaccggatgatcgcgccaggtttgactggcgatcagcgcgatggcgttcatcaacgtcgcaatcagcgccccttgccaaccatagtgccaggccagcgcgataatcggcagcgccagacagaatggcgtaaagcgcgacagttcgtccggcaatcccaactggagccagagactgataacaaacagcagcaagtaccagaccagatgtcgcccgcgccagttgattggctgagaaaccagtgacggaccgagcggcagccaggtgttattggcgagatagtgccagaacaccagacatatcggggccagcgtcaggccgccagttaaagtcagcaacagcgcattccacgactctttgccgtgccaaagccagggcagcgactgcaacaacgccgccgccgttaacgccgccccctgtaacagcaaggtgcgccagtcacgctgatggcgatagcgcgagatcagcgctacgggcagtaacgtcagtaaactaccgatcatcaataacggaaaatgggttaaaccgaccgcctgcgttagccagtaaatcagcagccactccgcgcccagcaatacgggccagtatccgcgcgggcattgcagcattagccccagacgcagaccaaacggaaataacagcaccgccatatcagggcgctcaaccagatgcaggctgatactccacaggcaaaaccatgcggcagagaagataaaaaagcaggcaataacggtaattaagcgggagaacaacgtcttcatcaccagccatcaaacatgcggcgcgccagctctacgtcgttactgacgcccagtttttccatcagattggcgcgatggacgtgtaccgttttcggtgacaagcccagttcggcggcaatctctttcaccgccattccttgcgccagtttttccgccacctggcgttcacgtttggttagcgggtcctgacgaccggatgccagtttaatggcaatatccggcgtcagataacagccgcccgtggcaaccgtatgcaccgcagcaatgagttcatccgggctacagcgtttggaaagaaagccgcgtgcccccgcgttaagcgcctgctcaaccagcgcaggactgtcgtgaacggagagcataatcgtcgccatacctttcggcagctggcttagcagctccagaccggagatatcgggcatggagatatcgcaaatacacacctgcacaccgcgccccggcagccccgccagcgcctcgcgccccgaaccaaactcggcaactacctgcaaatcaggttccagccccagcagctgcgcaaagccggagcggacgatgaggtgatcgtctataagggcaacggtgatcatggtcttgtcctggcgggtaaaaaaaatacgcgcttaccttaacgataagcgcgatgttgttcaagccttgagcggttactgaaaaaacaccgcgatcttgttaaacatcgtcggatcggactgattacgctgcactttcacgacatcttccagcttatcgatttggcttatcatctgctccagacgctggtcgtcattgaccagtagccagatatggcttttgtcgctgtcctgaatcggcagacaaagaatgccttcaacgttaaaagcgcggcgggcaaaaaggccacaaacgtgggtcattacgcccggatggttgcgaacggtgagctccagaattacgttgtcatgagttgtgttttgcatggcttattcccccaccatttcagtattcgccgcacctggcggcaccatcgggtaaactttttcttcggcatcaatgcgcacatggatcagcgccgggccagggcgattgatgatttcctgcaatgaagcctgcggatcggcttcgttattcaaatcacaggtttcgaggccgaatccggcggcaatctgcataaagttgattttgcccggataggtggcggcaaaaacgccttgctcgtagaacagactctgttgctgatgcaccagccccagcgcttcgttgttcatcagaatgattttgacatccagctgattttcactggcggtcgccatctcctgaatattcatcatcaggctgccgtcgccggagaaacacaacactttgcgatccgggttcgccagcgcagcgccaatcgccgcaggcaggccaaaacccatcgtgcccagcccaccggaggtcagccactggcgtgggcgattgagcggataagcttgcgcggtccacatctgatgctgaccaacgtcggtggtgataattgcattgtcatcgacacaggcggcaacggcgttgatcaggccgtaatggcttaacggatcgcacgctttcgggattggacacggaaactcacgctgcaaatccgctaccaactggtgccactctgcacgcggttgcgcttccaccagcgggatcaactgcgccagcacgtcatcaacatccgcctgaatcgccacgtgcggctgcttgattttacccagctctgcacggtcgatatcgacatgaatgattttggcattcggacagaactgctcggttttgccaatcgcccggtcatcaaaacgcgcaccgagcactatcaacaaatccgcctcctgcaaaatatagttggtgctgcgcacgccgtgcatccccagcatacccagcgacaacggatgcgcttttggcaacatgcccagcgccattaaagtcatggtggtaggcagttgcgctttctccgccagttcacgcacccgtgcgggcgcattgatcacaccgccgcccagataaagcaccgggcgtttggcagcgttaatcatcgccgctgcgtcacgaatgctttcttcgctaaaggcgggggcggcggctttttctgccatagcgggctgtgtttcaatctcaaaaactgccgtttgcacatccttaggaatgtctatccacaccgggcctgggcggcctgattgcgcaatgcggaaggcatcgctcatgacctgcgggagttcttcgatatgtctgaccagatagttgtgtttggtgatggggatagagatgccgtaggtgtccacttcctggaaggcgtcggtgccgatcatcgaggcgggaacctgaccagtgatgcaaatcagcgggatggagtccagccgcgcatcggcaatggcggtcaccaggttagtcgcacccggtccgctacaggccatacagaccgccggtttaccgtcggtgcgcgccattccctgagcgataaagcccgcgccctgttcatgacgggccagaatatggcggatttgcgtgctttggcttaaggcatcgtaaacaggcaggatagaaccgcccggaatgcctgtcacaatcttaatgccctgctgttccaggaaatgaacgataaattctgcgccggtaaagcgcttacgcgtcgatgttgtgcccgaacttgccatgctccagtccttttcttctgggccgactttccgggaggtgcttaaacgaaaaaccccgcccggtttgcgccggcggggttttggaatcgtgtgttgttccagtccctacggcgcattgccgacgaccaccaccacacgcacgacgaccactgcggcggatggcgcagttggtagtagttttgcgttgagcatggaagtagtcattggggaccttgttggttttgtgtttaacaatatttatacaagcacagctttacaggggagacaatggaaaatttttcagcaagggaaaattgaggggttgatcacgttttgtactgaattgcagataacaaaaaaccccgccggagcgaggtttcgtcagtcgcctgcggctggtaaccgcaaagcacactgtattatgtcaacactgaaagtatacgtgttccgcgcagaacgcgcaatttcggcacgaattttgacgtatttagtgcatagttgagtatcgatcacagtttgcgttttgtccaaatattactgtttatttatacagtaaacttctataatatcactgtacgcaatgtgttatgcgggggccgcatcgttacccggcgcactaagtcctggctgaaacgggtggtgccgtcagcgccttaaccccgcgtgagcacactgtgttatgtcaacaagcacaacgtttctccttgagataccgcgtgcacaacagctggcaacaggcagcggaaaggtacgtcagctggcagtgctcctgaaccacaggagacgcgtatgaacctggtggatatcgccattcttatcctcaaactcattgttgcagcactgcaactgcttgatgctgttctgaaatacctgaagtaattcagattcaagtcgcaccaaaggggagcgggaaaccgctccccttttatatttagcgtgcgggttggtgtcggatgcgatgctgacgcatcttatccgccctaccatctctcccggcaacatttattgccgcttttgtttacatattctgccgctaaacaattccccattcctggcgtatatctggctaacattcatcaatgtgatagattcctctcccgcatttatgggaatgcgtagtgacttattctaattatttttataaaagcatccgtgataatgaaaaggcaaagaaacgtcaatttgttattgatgttggtattactcgtggccgtcggtcagatggcgcaaaccatttatattccagctattgccgatatggcgcgcgatctcaacgtccgtgaaggggcggtgcagagcgtaatgggcgcttatctgctgacttacggtgtctcacagctgttttatggcccgatttccgaccgcgtgggccgccgaccggtgatcctcgtcggaatgtccatttttatgctggcaacgctggtcgcggtcacgacctccagtttgacggtgttgattgccgccagcgcgatgcaggggatgggcaccggcgttggcggcgtaatggcgcgtactttaccgcgagatttatatgaacggacacagttgcgccatgctaacagcctgttaaacatggggattctcgtcagtccgttgctcgcaccgctaatcggcggtctgctggatacgatgtggaactggcgcgcctgttatctctttttgttggttctttgtgctggtgtgaccttcagtatggcccgctggatgccggaaacgcgtccggtcgatgcaccgcgcacgcgcctgcttaccagttataaaacgcttttcggtaacagcggttttaactgttatttgctgatgctgattggcggtctggccgggattgccgcctttgaagcctgctccggcgtgctgatgggcgcggtgttagggctgagcagtatgacggtcagtattttgtttattctgccgattccggcagcgttttttggcgcatggtttgccggacgtcccaataaacgcttctccacgttaatgtggcagtcggttatctgctgcctgctggctggcttgctgatgtggatccccgactggtttggcgtgatgaatgtctggacgctgctcgttcccgccgcgctgttctttttcggtgccgggatgctgtttccgctggcgaccagcggcgcgatggagccgttccccttcctggcgggcacggctggcgcgctggtcggcggtctgcaaaacattggttccggcgtgctggcgtcgctctctgcgatgttgccgcaaaccggtcagggcagcctggggttgttgatgaccttaatgggattgttgatcgtgctgtgctggctgccgctggcgacgcggatgtcgcatcaggggcagcccgtttaagcgcacgtcaccgcagcatcgtcatcagctccatgggagaacgatgctgctttatcagatcacgcatcacccgcatatgcggtgcggagtaagaataaaacgcctgatagcccgcacaaagcacgctgtctggcgtctcctgccgagcgtgcgggcacaggcgatgccagtcgcacgcctggcagtcacagcgcggttgcgggttttcgctgccacaccatttttgtaaggtggcgtcaaaaagctcaatcgagatacgactgatatctgcccgcacccaacactcgaacagggcaattaaaaatttcccccacagctctgctgtcaccgaagcggccgtcagatcgccccggtcatcaaattcaagatagggaatgagctgtacggagcggatgccccgctgtttgaaattgtgataaaaatcggcaggttgcagagcatccttgtactctacaaccagtttatgcctgtcctcttcagcatcaatgacctgacttcctgtcatgcgactctctcaataaatacgataagttgatgtatatgcgttacagcaaacagtattgcgagagataacaccgcgagggagatcaaaaatttgtcacggactacgtgaaattgggaaaaatcgctattcgtgacatccattaaattgcgattacgggtgtagtgccagaggatcagcgccacgatggcgagaatgccaatcgaaatccagaataacatgcccgcctggtgccagttgtgtttgatagccaacgccatcaacgcgccgtagcccagcatggtacgaaaccacgccagtgatgtgcgctccggctgcagtcctgggtcggcaatgcgtctggctttgcggctatccggcatacaacaccagtcccataacgatcaccgccacgaccatcaatattaagctaatgattaataagctgttggtgtagggcaggtcctctttcagacgcatcgctttttcattgcgtaaccagcgcaagtagccatacatcgctaacccgccggaaaacagacacaacaacaacgccagcagttcgcgaatgacgggcgtggcgaaatctggcgcaagttgatcaagcccaacccccgccgccagaaatcctagtgcagtacggatccacgccagaaaagtacgctcattagccagcgagaagcggtaatcaggcgcttctccgaggcgggaaattttcattgttgctcctttgcaatttcactaacgctctacctttagcggtttttttaagaatttcgtccgcccgtttcctgatatgcttttgccatccgctacaaggaggtcagatgggtatcatagctcaaaataaaatcagttcattgggcatgctgttcggtgccatcgctttaatgatggggattatccacttttcattcggccctttctccgcaccaccgccaacgtttgaaagcatcgtggcggacaaaacggctgaaattaaaagaggtcttctcgccggaataaaaggcgaaaaaattaccaccgtggagaaaaaagaggacgtagatgtcgataaaatcctcaatcaaagcggtatcgcactggccattgctgcgctactttgcgcatttattggcggtatgcgtaaggaaaatcgctggggcattcgcggcgcgctggtttttggcggcgggacgctggctttccataccttgctttttggtatcggcatcgtgtgcagcattttgctgatattccttatcttttccttcctgaccggcggttcactggtttaagcagcctgaataatgcccgccgggtgatcatcagcgggcattatcgtcagaacttctgttttttctcctccaccttcaccccttgtgtcggtaggccggtgtcatagtcgcgtacaactggcgaatagccatcttgtggacgtggacgaaacgcccccatccagcgcggccgtgcatctttacgccacggacgcagactccattggtaactgcggaacggatcgcgaattttgtccatgtaatccaataaggcgtcatgcattttgctgcgaacgtctgcaaaacggatatcatcgatcaggttatgcatttcatttgggtcattacggcgatcgtaaagttcatcactggtgaagaggttgagtaccagtttaaagtcatccgtcacccagcaacgcaccggaataaaaccgccaaagctgtcatgctcaatctcgtagcggttaaattccaccatcacgccgcgtggctctttcacggcaaggatattttcccccggcagaatctctggtttttcaatatctgccagcgccatcattgtcggcagtaaatcgatatgactgactggcgtatcgacctgtcgccgctccccttgcggcgaacggatgatcagcggaatgcgggtgatgtcgtcatacatcgccgcccctttactgatcagcttatgtgcgcccatcatttcgccgtgatcggaggtataaataacccacgtattttcacgttgctctggcgttaaggcattgatgacccgtccgatttggtcatcaacaaagtcattacaggcaaaatagagcggatggtgataaagcccgtcatcaccgactggcgatggcatcgcctgcgcccataagcggtgatgttccggtttgttagccaggtcatcctgtgctttctcgcccagctcgtagtaaaaatcagcgtatttctctaaatactccaccggacaggtgaacgggtgatgcggctcatcatacgaaaccaccatcaggaaaggctcgtctgcgcgcgcaggctgttgcagaaaatccaccgcccgattgctgatacgatgcgcccaggtgaaggtttcgtcgatatggttcgcctgtaaatcttcgacgctgtttaggccattgcgccacaggctaatctctttttccgtcagttcgctaagatagttcgccccatcgaaccagtaatcagcgtcccactccggcggacactcgccagtgccgaaatagtcatgaccgtcgagatgccatttgccgatgtaacaggtgtgatagccggcatccttaaagtagcgccccatagtggagatgtttttgcctggcgcgacgttgttggtccacgggccggactggttagcgtagataccggtaaatagtccggcccgtgcaggcgtacaaaccggtgaacaggtgtaggcggaattaaagcgaataccttccgccgccagactatcaatattttgcgtattcagcggtttaccgctatagcaaccgaccatattggtggcctgggtatcggtcatgacgaacagaaaattggggcgtttcataggctatccttcccgtcgggagtaaaggttacggctgggtcgtgacgatgccgccagctgtcaaaaatcaggtagacaatcactacggcggcaatgaaataactgatcatcgctaaccagcgcgtaccgtagccgccgaattcagccagcccggcatagacgccaatcatcgcgaacaggatgccaattgacgcgatcttgacgtttttccacggtttcatgtccaccgcaaacgcatctttgaaggtgaacggcgtggcgcgcggtttgataaaaccgatcaccagcatcacgaccacgttgatgcagaacgtacaggccagcacatagaggaaatggaagtcgaacttcaccagatagttgatggtgatgtagctgattatgccaatccccatcgctacttttgccgccagcgccgggatgcgcgggaagaaaaagcccataatgatgatggtaaccagcggcacgttgtaaatgccgttgagctgtttcatccagctatacagcccctgcggcgcgttggcgatccacggcgcgaccagcaccgaaacgatagcgataaagaaaccaaatttgcgcccgacggtgaccagctgctgcggctcggcattctggttaatgatgcgacggtaaatacccatactgaataacgtactggcgctattcagaaagccgttgaaggtactgatcaccgcaccaaataacaccgcgccgaagaaacccaccattggcactggcagaacgttattgaccagcgtcgggtaggccatgtcggctttcggtaaatcctgatacagatgaaacgcaatcaaccctggcagcaccagtaccagcgggtcgagcattttcagcaccgccgttaacagcgcccccttttgcccttccgccaggctttttgacgccagcgtgcgttgcacgatgccctgatttgtacaccagtaaaaggtgttcaccagaatcaaaccggtaaatgccgcgccaatcggcaagggatcggtcgggccaccgattgagtttaatttctcggcgtgaacggtggtgagttgctcaatgccctgcataaagctgcccttgcccatcgcgattaggccaaataccggcaccatcaacccgccgataaccagcccaataccgttgatggagtccgccactgccattgcgcgcagtccgccgatcaccgcatacaaaattcccgccagaccaagcaaaattaccagtagccagatagccgcaccgtgagaaatctgtagcgattccccgacgtgaaacaggctgttgagcgccaacgcgccggagtagagaacaatcggcagaaagcagacgccggtggcaattaggaagcagaagtcgatgataatacgcgtcgttttatcataacgttcctccagaaaatcggggatggtggcaatgccgcgcttcagatagcgcggtaaaaagattagcgcgaggaagatcagcgtcaccgctgaagtcacttcccagcccatcaccgacatgccgcttttgtaggcctgcccggaaaggccgaccagttgttccgtggaaaggttggttagcattaacgaagcggcaataaccggcgcttttagtgaacgtccggcaagaaaatagccttgttgcgatccggtatctgttttgcggaccttccaccaggtgatcaccgccaccagcagcgtaaaaccgacaaaactcaagatttgtaacgaattcatctcatagcccttatttatgtttatgtcccggacgcatgaatatagggagaggtaaaatgcgtcgggtcaggcagtcagattcttaaaatacaaacgtcgtatccctgaacggattgttttctgttaagttcaggttgtgagcataattcgccggagggatattaaaatgaatggaaaattgcaaagttcagatgtaaaaaacgaaactccgtacaatattcccttattgattaacgaaaatgtgatctccagcggaatttctctgatctcgctctggcatacctacgccgacgagcattaccgggtgatctggccgcgggacaagaagaaaccgcttatcgccaactcatgggttgcggtgtataccgtacaaggatgtgggaaaattcttttaaagaatggcgaacaaataacactgcatggcaactgtattatattcttaaagccaatggatattcactcttatcactgtgaaggtttagtctgggaacagtactggatggaatttacccccaccagtatgatggatattcccgttggtcagcaaagcgttatttataatggcgaaatttataatcaggaactcaccgaagttgctgagttaataacttcaccagaagcaataaaaaataatctggcagtcgcttttctgacgaaaattatttatcagtggatttgtcttatgtacgcagatggtaaaaaagatccacaacggcggcaaattgaaaaattaattgccactttacatgccagtctgcaacaacgctggagcgtagctgatatggctgccacgatcccctgtagcgaagcctggttgcgtcgtctgtttttacgctataccggcaagacgccgaaagaatattacctcgatgcgcgtctggatctggcgctatcgctattaaagcaacaaggaaactcggttggcgaagtcgctgatacgctcaacttcttcgactcctttcatttcagcaaagcctttaaacataaatttggttatgcgccgtcagccgtgctaaagaatacggaccagcacccaacggatgccagtccacacaattaacgtaactctggccagtacgctttgttggcctccagcaactcatccagaatagctttggcgaccgaggcgctcggtaccgttttcgacaacgtaatcgcctgccacaggtgctgatatgaacgctgttcccaggcgtccacgaccagtttttccaccgccacttgctgactcattaaccctttctgaaactgcgggatatcgccgaccaccagtggttcaggccgtagtagcgcacgcgcatctgtttgcgatcttgcagcccaacaatttgcgccatccggctttcaataccgattggcatgtcacagatgttgaggattttcgcattcgggcgcagacgacgcgtggcttctgcgacaatggctgccgggttggagtagttgagcatccaggcatttggtgaatatttttccatataatccaccagttccaggacgccgccaatggaacgcatgccgtacgctattccgccgggtccgcaagtttcctgaccaacaacgccgtggcgcagcgggattttttcatccagttcgcgcatcgggtatttgccgacgcggatgtgcgccatgacaaaatcaacgtcgctgaatgccacttcaggatcggtggtgtaactaaacgcaatgtccggcgctttttctttaaggatgactttacaggcttcggcaatcacttcctgccgcgcaccatcgttatcataaaatttcagtgcacgaagcgggaaacggtcctgattcgccaggagcatcaacacgatgcctggcgtaaaggtgcttccaccgcctgcgacaaccactgagaatttggtcattatactgcctccgtaatggcaacattttctgctgattgatgagaattaattaagctatcgagctgttcacgcagctgagatacatgcagaccaatgatcacctgaatggcatcgccactacggaagacgccgtgcgctcccagctttttaaagacttcgtcatccagcgtttgtgacatgtcatgcagtgcaatacgtaaacgcgtcgcgcaattgttaatgctggagatattgccgaccccgcccagggcttgcaggataccggcagcctgatccagctctttttttggctctgccgcggtggtttggcctcgcgaggctttgtattcggcttttgagtagagtttcacttccgcatcttcacgtcccggcgtgcacatgttgaactgcagaatcagtgtgcggaaaaccacgaagtacagcagggtaaagcacaacccaatggcgatttgggtcagcatcatatccgcgtggttgctgaacatcgggatccagttttgcggtaaaacctagtcaatcagacctccgcccatgttgcccaccacaccaaagagatacattacggtcgacattgaggccgccagcacggcgtgtaccgcaaacagcaacggtgaaatgaacaggaaggtaaattccagcggttcggtaattcccaccagcatggcggttaaggttgcgggaatcagcaagcccgccacttttacccgattttccggtgcggcagtgaagtacatcgctaaagaaatgcccacggcaccaaagatttttgagttaccgtgcagggcaaaaccgccttccgggaacaacgatttcagcggctcggcgctcaaactgaactcttgcagatgctgcgcccagtacatctgaatgccgccttcaacagctgccggaccaaagataaactgtccgtagatgaagtggtgtaaaccggttgggatcagaatacgttcgaggaaggtgtaaacccagaccccaagtgcacccgccgaacgcaggaacgcttgcagagattcaatccccatttgtacttttggccagccgagcaacgtcagccaggcacaggggatcatcaccaggaaggcgataatcaccacataagacgtcccctggaaaatgccgagaaaaaccggcagttttttatcgaacagacggttatgcagcgccgtcacaatgccggaaatgataattgcgccgataatgctggtatcgagggttttaatcccggccatcattgtcagaccgctacctgccaccgcgtcctgagtgaaatcgacgccgaagtagcttccccaggtcattcccatcgcgttgatgaaatagttccaggtcaggaaactcaccatcaccgccagacaagcacgcccctgcgcttgcttagcaaggccaatgggtaaaccgacagcaaaaatcagcggcatattacggaataccgtccaaccgccctcttcaataatgtgtacgatttgcgcgaataaactgttcggatcggtcagtgattccccgacaaacatcgggttttgcagcaagatggcaagacccaccacaatcccggcgaagggaaacagcagcactggcgtgaacatcgcgccgccaaagcgttgaatttgactgagcatttccacatcctcttttctcaattctgtaagtaggaagcctgattggttatgcggcaggcctggagcgaggataggaagatgcgatcggcagaacatgacgacccaatgggattcgtgatcgctttcatgcttttcgttgggcggtagagatctacgttttcgcgaaaaagtagacctctgtgagcacaggtacacagcatcgaacacatctttaaaaaaaagatgttttttcaatcgattaagcagaacttgtgtgcgcattacccgggcttgcaggcaaaaaagagatctagagatgatctacaaaagcattgcggagcggttaagaattcgacttaactccgcagatttcacgctaaacagccttcttcccggtgaaaaaaagctggcggaagagtttgcggtatcgcggatgaccatccgtaaagccattgacctgctggtagcgtgggggctggtggtccgccgccacggtagtggcacttacctggtgcgcaaagatgtactgcatcaaaccgccagtctgaccgggctggtggaggtgttaaaacggcagggaaaaacggtcaccagccaggtgctgatttttgaaatcatgcctgcgcctccggccattgccagccagttacggattcaaatcaacgagcagatctacttctcccgtcgcgttcgttttgtggaagggaaaccgctgatgctggaagacagctatatgccggtaaaactgttccgtaatctttcgctgcaacatctggaagggtcgaagtttgaatatattgaacaagagtgcgggattttgattggcggtaattatgaaagcctgacgccagtgctcgccgatagactgctggcgcggcaaatgaaggtagcggaacacacgccactgctgcggatcacctcgttgtcatatagcgagagcggggagtttttgaattattcagtgatgttcagaaatgccagcgaataccaggtggagtaccatttacggcgactccacccggaaaagagttaaccgatactccagaagagcaccgccagtaattggggggtgataatgcgcaggaacattaccaacggatagacagtggcgtaagagagcgccgccgcaccgctggttggatgaagattattagcaaacgccagcgccggaggatcggtcatggaacctgccagcatcccgcacatggtcaggtaattcattttggctaacatccgcgccagaatgccaacagtaatcagcggaacggcggtgatcagggcaccataaccaatccagcttagcccttcgccattgaccagggtattcacaaaatccccaccagatttcagaccaacgaccgagaggaacagcacgatccccagctcccgcagcgcgaggttggcgcttggcggcataaaccagtacagcttgccgatactgccgatacgcccgaggatcaacgccataatcagcggtccgcccgccagccccagtttcaacgcggccgggaatcctggcacaaagacgggaatagaacctaacaatacgcctagcccgatgccaataaacactggcagcatctgaacctgttgcagtttttgctgcgcattccccagcacattggcaacggcatcaattgcggacggacgccccaccagattgaggatatcgccgaactgcaggctgatatcgccactggcgaccagttcgaccccggcacggttcaggcgcgagataacaacgtcatagcgttctttaaagtgcaggtcgcgaatacgttttccgagcacgttttcattggtgaccaccacacgctcgacgcgcaaatcagtgcctttcgtggacagcgaagtatcgacctcctgaccaatcaccagttgcgcattatgtaaatccgctggctgacccaccagatgcagcaaatcgcccagttggataatggtatctggcgaaggaacttttagggtttcttcgcgtttcagacgcgagcagataattttgtcgccgttgagaatcggtacatctttaatggctaaatcatgcaggttagggttctcaacgcgaatattgatagtcttgatcagcgcgccgccattggtgcgtgaagactcgtgctgctgagcttctgtctcgacattgacgcggaaaataacccgcaacatccacatggtgaacaaaatcccgcaaatgccgaatggatacgccatcgcgtaactcatccccatctgatcgaccatttccattggtgtacccaggtcgcgcaaaatctgctgccctgcccccagcgctggcgtattggtaaccgcaccggagaaaatccccagcactaccggcagtggaatatcaaacagtttatgcaggatggcggtaaccagaccaccgatgatgacgatcagaacagcaaacaggttgaggcgtaatccggagacgcgcaatgaggcaaagaagcccggccctacctgaatcccgatagtataaacgaacaggatcaggccaaattcctgaataacatgcagcatatcgctacttaatgtcatccccgcctgagaaacaaaatggccgacgatgatcccaccaaacagcacgccgccaatacctaatcctatgccgcgaaatttgacgttgccgataaacaaaccgacgactgccaccaaagccagaatactgaccgttaatgctatatcactcatcgtccatttctcttgagataacattttaattgctacggattatggctgaatcggtgaagcagatttgccttatagcgcacattatcacgggaaagaacgtgccgaaatatcttaaacagtcgaaatttaacgcattgttgagtaagtaagacaaaaaaagccccaccagaatggcggggcaaagagaatagctagttagctatttaacgcgggacgttcgctgatagcgatacgctgcgctgcgatgggttcaggctcattacgaattaaatcaatatgcagtaaaccgtttacgaaggttgcgccagagacttccatattttcagccagcgtaaagctcaggctaaatggctgattcataagcccttgatgcagccattttttctcttcttttggctgctccggcgtgccttttacgctcaggcgcgtaccttccagttgaatctctaaatcttcctgacggaaacctgccagcgcaagggtaatgcggtagtggttatcgtcgcttttctcaatgttgtacggcgggaagctctggctttcaccggcgttttgcagtgcgttggccagtttgtcaaaaccgatccattgacgcatcagtggggataaatcgaagttacgcatagtcatttctccttctaagaagcgagtaagtacctgcaaatccgaagattcgcatatgctccctgacggcgagcatggagatgtcaggccgcgccaggcggccttagggaattagttgatttcgatacggcgcggttttttcgcttccggaatcacgcgttcgagatcgatatacagcaaaccatttaccaggttagcaccacgaacatgaatgttctcagctaactggaatttgcgttcaaagttgcgttcagcgatgccctggtacagataggtgcgctctttttgttcgtcggcgtgagcacctttcaccaccagcagattatcctgggcggtaatttccagttcgctctcagcaaaaccagccacagcgatagcaatgcggtaatggttttcgtctaccagttcaacgttatacggagggtagccgccattactctggctctggttgttttctaagtggttaaacaaacggtcaaatccaatagcagaacggtaaagcggggataaatcaaagttacgcataatcaatagctcctgaaatcagcgagaatgtaagaccttccacaatggacaggtcaggtagccagaacacccatcaggcgcgtcctcatcggctacgatgtaaaaatgggtctggaaatgaacttttcaagccttatcagcggacttttttttgcagtttatggtctattgcatagactgagggggcagcacgaaacgttaaagtgcgatagccgccacagtgcgacgtaatgatgatgttattttcagcaagggatcgctataactcatcaggccaacacccacgatcaacagatgaatttattatgataagaaatgtgttgttagcgttcatgatatgcagcggaatgacattactcggaggatgctccagcgtgatgtcccataccggagggaaagaaggaacgtatcccggcacccgcgccagcgcaaccatgattggcgacgatgaaaccaactggggcactaagtcgctggcgattctcgatatgccgtttaccgctgtgatggacacgcttttactgccgtgggatgtgttccgcaaagacagctcggtgcgctcgcgcgttgaaaaaagcgaagccaacgcgcaagccaccaatgcggttattccaccggccagaatgcctgataactgatttagcgatcagtttcggtgatccacagctggccgccttccatccacgccagccactgaccatccggcgagaagaccacggcgtccgcagaaggtgaattggcgtggtgttcggttaaatactcaacctcgccgctttgcgcatgggcacaagcaattcgattatccagcacaaagcccaaccattctcctgacggatgccagttaaatgcagactgaatatccgttttgttatgggttaactggcgcggctcgccgccctgtggcgagataagccacagttgcacaatgccgttatcatctcgcattaaaaacgcgatttgtgtaccctgcggattacagcgcacccagtggcgcgggacgttgactaaccccggataagcccgatggtgggtaaaggttaaacgtcgctgcacgacgccacgcggtggcgcgggcagggttgtttccgttccgcttaacggcgcatcacctgccgctttccagccagcttcatcttgcggtaactcaacgataaacagctccggcactttctcgccctttggcgaaagtgtgtcgccaataaatgccagcgcgtgatttcctacccatccttcttcataagcacgattgatttcatcactgccaggctgtggcgtgggcgtggttttgctcaccagcacgcaccagtggctaccgctgtattcacgcggatgctgcttttgtacgttgaccgggccaaacggcgcagcaacaccgacgtttcgcaaatccagcgccggatcgagttcatgcattacatggtcgttataggtaaagctcaccctttcaccgttcgggctaaagacatgcacatggctgccgccgcgcagcactcctggcgtatacggcgcggtaatatccatcgcatcaaggttactcatcttgccgccttcaacaatcactccgcgccgatgatggaagtcgtaatgccatgtttcatcaggattttccgggccgtggatgaaaacatatttctctgacttcggatgaacggtcaccacgccgacgtgtgcgccctgtgacgcgcgatagataacctcgacctcgccggtatggatattcacacgctcaatggtctcgccggtaaacgacgcgccagaaggacgcacgtcaaataccagccactggctgtcgggcgtccaggtattggtattggtgagcaggtgattacggggagcaaaggttatctgtttcatggcgcggtcctgatacaaaacgggtcccgccatcatacttcacaaggacttcactttcagacaatagtcttttgccatcgtgatgaatgtgagtgaaaagatggaacatttcgacgtggcgattattggcctcggcccggcaggatcggcgttggcacgaaagttagcaggcaaaatgcaggtgatcgcgctggataaaaagcaccagtgtggtactgaaggtttcagcaaaccctgcggcggtctgctggcaccggacgcgcagcgatcttttattcgcgatgggctgacgcttcctgtcgatgtgatcgctaatccgcagattttcagcgtcaaaaccgtcgacgtcgccgcatcgctaacgcgtaactaccagcgaagctatatcaatattaatcgccatgctttcgacttgtggatgaaatcgctgatccccgccagcgttgaggtttatcacgacagcctgtgccgaaaaatctggcgtgaggatgataaatggcatgtcatttttcgtgcagacggctgggagcaacatattaccgcccgctatctggtcggtgccgatggcgcaaactcgatggtgcggcgacatctctacccggatcatcaaatccgtaaatatgtcgctatccagcagtggttcgcggagaaacatccggtgccgttctactcctgcatctttgataattcgataactaactgttattcatggagtatcagcaaagacggttattttatctttggcggtgcctatccaatgaaagacggtcagacgcgtttcacgacgctgaaagagaaaatgagcgcctttcagttccagtttggtaagacggtgaaaagcgaaaaatgcacggtgctgtttccctcgcgctggcaggattttgtctgcggtaaggacaacgcctttctgattggtgaagcggcgggatttatcagcgccagctcgctggaggggattagctatgcgctggatagcacagacattctgcgttcggtgttactgaagcagccagagaagctcaataccgcttactggcgcgccacccgcaaactgcgtttaaaactcttcggcaagatagtaaaaagccgatgcctgaccgcaccggctttaagaaagtggattatgcgcagtggtgtggcacatattccacagttgaaggattagccaacgcgcttcacatcgcccaccagcaggatataagagagcgcgccaatcaacgcgacggcggagatataaaccagtgcaggtgcgaaaccgtaaccctgcgccaggtaccccaccaccagcggaacggtgatgccgcccagaccaccggcgaagttaaacacgccgccggttaaaccaatcaggcgcatcggtgccagagaagaaaccagcgaccaggtaatcgaagcaaaaccgttaccgaagaatgccagcgccatcaggcacataatcatcatcggatcgttagtgtagttagcgcccataatgcaggtggagatcagcaagccgcagataatcggcgttttacgcgcaaagcccagtgaaaagcccttacgtaccagcagatccgctacccagccagagagcaggacgccgacaaacgccgcgaggaatggcaccgtggtcataaagcctgctttcagcgccgtgattcctttttcctgggttaaatagttcgggaaccaggttaagaaaaaccacagtgtagaagccaccgcaaattgcccaagataaacgccgatcagtttacgatggaacaccagtttccagtctttggctgttaacggctgacgcgcctctttcttcaccggcgcatcaccatccaccagaccgccgccatcacgaatgtaatccagttcagctttgctgatacctttggtcaggcgcggcggctgataaaccttaaaccaaatcagcgaccagataatgccgataccaccagtgacaatgaacacccagtgccagctcaacatctcctgaatccagatcagcagcggcgtcagaaacgccagaccgacaaactgaccagacgtataaaaaccaacggcagaagcgcgttcatgttccgggaaccagctggtcaccatccggttattggtcgggaaagcaggcgcttcgaaaataccggttatcgcgcgcagaccaattaatgacattaagcccgtggcaaagccctggaataaagtcgccactgaccagccaaatatcgcaataaaataagtcacgcgagaacctacgcgatctaaaaaccaaccgccggggatctgacatagcgtataaagccaggcgaaggccgaaaatacatagcccatttccgctttggtaatgccgaactcttcctgaatatgggcggaagccacggccaggttggcgcggtcgacataacaaatgactaccgtaataaagatcatcaccagcgtcagataacgccgacgccccggctttgctgcattaacgggaatatccatagcgagctttctccagattttgggcatagcgaagccgctcaccatgccctgtaatttacagagggttatatttttgtattgctgttttagtgcccgatgaggggcttacgtggcaggaattaccactctgctacgctgttatcttcatgacgccagagcggattacgccagtccggggcatttttactgaactcaatcactttagcttcgtcgatttccacgcctaagcccggtttcgttaacggtttaaagaagccgccgaccatgctgaagtcttctttgtttttcacaaagtcgagtaactccgcgcctttgttgtaatgaattcccatactttgttcctgaagtacggcgttataggaaacaaagtcgatatgcaggcaagccgccagtgcaatcggtccgagcggacagtgcggcgcaagggtcacgtcataggcttctgccattccggcgattttgtagcattcggtaataccgcccgcgtgggagagatccggttgcagaatcgaaataccacctgcctccagcacgcgtttaaaatcgaagcgtgagaacatgcgttcacccgccgccagtggaatatgcgtttgtgccgccagtttcgggtagtattcggcttgttccgccagcaccggctcctcaataaacagcgggcgatacggctccagttctttaatcagcactttcgccatcggcgcgctgacgcgaccgtggaaatcaagaccaaactcaatctgattgccaaaagcttcacgaatttgtgccacggtgttaaccgccgcatctaccgcgcgggagttatcaattagccccagttcttcacaaccgttcagtttgaaggtatcgaagccgatttcgcgtagcgttttaatgccgtcgataacatccgccggacgatcgccgccaacccaactgtaggctttaattttgtcgcgaaccaggccgcccatcagttgccagaccggcgcattcagcactttacctttgatatcccataacgcctggtcaatcccggcgatggcgctcatcaggatcggaccgccgcgatagaatccggcgcgatacatcacttgccataagtcattgatgcgcgatggatcctgaccaatcaaatagtcacccagctcgtgaactgccgcttccaccgtacgggcgcggccttcgatcacgggctcgccccaaccgaccacgccttcatcggtttcaattttcaggaacatccagcggggaggtaaacgatacgtggtaattttggtgattttcattgcactgcctctcgatacgccttaacaaatgctgctgcctgctgcgcggtgcgctctacggattgcccggcgcgatagagatcgctgcctaagcccgcccctgcacaacctgcgtctatccactgcgccaggttttctggcgtcacgccgccaacggcaaagactgcgatgtccgatggcaataccgcttttaacgctttgatgtattgcggaccaaaagccgatgacggaaatattttcagcgcctgcgcgcccgcttcgagcgcggtaaaggcttcggtcgccgtcgcgcagccggggcagacggtcatgccgtagcccaccgcacggcggatcacttcactatggatattgggcgtaacgatgagctgacagcccatcctggcgagcgcatcgacctgttcaggtttcagtaccgtacctgcgccaatcaacgccttgtcgccgtacgcatcaacgatggcgggaatgctttgctcccattgtggggaattcagcgggatttcaaccgcgtcgaacccggcgtcaatcaccgcgccaacatgcgccagcgcctcgtcgggcgtaataccgcgcaaaatggcgatcagcgggagtttagtttgccactgcatgagcgatgctccttataccagcctgaaatgccgtgtcgcccgccaccgccgtcacgtcgcaacccatcgcctgaaaggcttgctggtagcgcgcggtcagcgatgttccggcgacaagggtgatggcgtgttgatgggccacatagtcgcgcatactggcgacctctgcgccaatcaacaaaccagagagaaattcgctgacctgttcgcggggaagtgttcccagcacatgcgaggcgcgaacttcaaaaagctgcggcaatatggcgggcgtattaagaccacgctcaaggccagctgtgaaggcatcggcagagttttcctgcggcggcaaacctgcgccaatcaatgagtgatttaacagtaaatgatgtaattcaccggtcatcacggtgcgaaaatcgttgatttgctggctatcggcctgcacccatttgcaatgggttccgggcatgacataaagagaggaaggagccagagctcgcgcgccgatcaattgtgtttcttcgccgcgcatcacattgtggttatcgtcatgagagacacataatccgggaataatccagatattgtcgccaactgacgttaattgttcgccaatagacgaaaaacaggcaggaacagataaatacggtgcaactttccagccgacgttgctgccaaccattcctgccattaccactggcgttttctcttcacgccagtcggtcgtgacttctgctaacaccgcagccggagattttccgttcaggcgcgtgacgcctgcttctgattgcctgctctccaggcagtggtcgccctgataaagccaggcgcgcagattggtcgatccccagtcaattgcgatgtagcgagctgtcatgtgatttcctttaaccttcgtgtcgagctggcgatcatggtaagcgccgcctgctctgccgcatcgccgtcctgatgtcgtatcgcatcgaacagcgccttatgttcctggagcgtttgcggcatgttggcctcatcgcccatccaggttcgttcaaaaaccgcccgctgcagcgaactgatcgcaatgctaagttgctgtaacaccgggttatgcaccgactgcagcaccgcctcgtggtagcgaatatccgcttcgttaaacgcttcgcggtcctgattgttggcaatcatctcgttcagcgccgattcaatctgcgccagatcgctggaagtcgcgcgctctgctgcccaacgggcaatcgccggttccaccagatttcgcacttcgctcatggcactgataagccgtgggtcgtagtcattttccagcacccattgcagtacgtcagtgtcgaggtaattccactggttacgcggtgccacaaacgccccgcgataacgtttcatttcaatcagccgcttcgccatcagcgaacggaacacctcacggatgatgttgcgcgaggttgcaaactcctcacagagttccgcctcagccggaagcggcgagcctggcacgtatttgccgtgaacgatctgtttacccagcgtaatgacaatgcgatcggttttattgagagtcatggagagtccttgtgctctgtatgttcttctctactttaccccgatcgatgcataacgcggcaactttgtagtaccagcgtgatgacgttcgcgtttgccgtgcgtgtaatgtagtacaaacttatattgttgtactacaatttagatcacaaaaagaacaatgcataaaaaaatgacatgcgtcgggcagaaatctgaaaagggatatcaggcgctaaacaggagggaaagaagagtatgctttcaacggcttagctactcgtttaaaggattaatcatgaagttgaattttaagggattttttaaggctgccggtttattcccactggcgctgatgctttcaggctgtatctcgtatgctctggtttcccataccgcaaagggtagttcaggaaagtatcaatcgcagtcagacaccatcactgggctatcgcaggcaaaagatagtaatggaacaaaaggctatgtttttgtaggggaatcgctggattaccttatcactgatggtgccgatgacatcgttaagatgctcaatgatccagcacttaaccggcacaatattcaggttgccgatgacgcaagatttgttttaaatgcggggaaaaagaaatttaccggcacaatatcgctttactactactggaataacgaagaagaaaaggcactggcaacgcattatggttttgcctgtggtgttcaacactgtaccaggtcactggaaaacctaaaaggcacaatccatgagaaaaataaaaacatggattactcaaaggtgatggcgttctaccatccatttaaagtgcgattttatgaatactattcacccagaggcattccggatggtgtttccgcagcattactgccagtgactgttacgctggacatcattactgcaccgctgcaatttctggttgtatatgcagtaaaccaataatcagtaagcgggcaaacgcgtttatgctgtttgcccgcccacagattaattcagcacatacttctcaatagcaaacgccacgccatcttcaaggttagatttggtgacaaagttcgccacttctttcactgaaggaatagcgttatccatcgccacaccgacgcctgcatattcaatcattgcgatatcgttttcctgatcgccaatcgccatgatttcttccggtttaatacctaacacgtcggccagtgatttcacccccgtacctttgttaacgcgtttatcgaggatttcgaggaagtacggcgcacttttcagcacggtatatttctctttcacttcctgcggaatacgcgcgatagcctggtcgaggatggcgggttcatcaatcatcatcactttcaggaactgggtattggggtccattttctccgcttcgcagaacaccagcggaatggtggcaacgaaggattcatgcaccgtgtagtagctgatatcacggttggcggtgtacagcgtggtgcggtccagggcgtggaaatgagaaccgacttcgcgagagagtttttccaggaaacgatagtcgtcatagctgagagcagtttgcgccacggtgctaccatcagcggccttctgtaccagcgcgccgttataagtaatgcagtagtcgcccggctgttccatatgcagctctttcaggtagttgtgcacacctgcatacgggcgacccgtcgttagcacgacattcacgccacgggcgcgagctgcggcaatcgcatttttaacggcgggtgaaatggtgtgatcgggcagcagaagggtgccatccatatcgatagcaatgagtttaatagccatgagttccccaggtagattggttcctgacccatgctaacgcgattccgctcaaaaatcagtacaacacccgagggaaaagggggatgcaacgcgcgttgcgtgctccctttttgcttagcggaagagtttccctttcagcagttccatgcctgcggaaagcagatcgttattggcttgtggtgacacttcaccttgcggtgagagcgcatcaataatcttcggcaattgttctgccagtaaactggaagctgtactggtatccacgccaagtttttgcccgagatcggacaccgcatttgtgccgagcgccgattccagttgctcgccactaaccgattgattgccctgttgattactcagccaggttgagagaatggcccctaagccgccactttgcagtttttccagcagcacctgaatgccgccctgctcctcaacccaacttaaaatagcctgatatttccccgcatcgcctttcagaaaggcaccgacaacttcatcaaaaagccccatgataatcacctgtaaagcgttacgtgttgacccaaaaagtatagatttgcgggatgataattgcggattgcagaaataaaaagggcggagatgatctccgcccttttcttatagcttcttgccggatgcggcgtgaacgccttatccggcctacaaaatcatgaaaattcaatacattgcaagattttcgtaggcctgataagcgtagcgcatcaggcacgctcgcatggttagcgccattaaatatcgatattcgccgctttcagggcgttctcttcaataaacgcacggcgcggttcaacggcgtcgcccatcagcgtggtgaacaactggtcggcagcaatcgcatctttaacggtaacgcgcagcatacgacgactttccgggtccatagtggtttcccacagctgttccgggttcatctcgcccagacctttataacgctggatggagaggccgcgacgggactctttcaccagccagtccagcgcctgctcgaagctggctaccggctgacgacgctcgccacgttcgataaacgcatcttcttccagcaagccacgcagtttctcacccagcgtgcagatacgacgatattcgccaccggtgataaactcgtgatccagcggatagtcagtatccacaccgtgggtacgcacgcgaacaatcggctcgaacaggttttgctcagcattggtgtgaacatcaaacttccactggctgccgtgctgttctttgtcgttcagttcgctgaccagcgcgttcacccagcgggtaacggtctgctcatcagaaaggtcagcttccgtcaacgtcggctgatagataagctctttcagcattgctttcggataacgacgctccatacgattgatcattttctgcgtcgcgttgtactcagataccagtttctctaacgcttcgccagccaatgccggtgcactggcgttggtgtgcagcgttgcgccgtccagcgcgatagagatctggtactgatccatcgcttcgtcgtctttaatgtactgttcctgcttgcctttcttcactttgtacagcggcggctgagcgatatagacgtgaccgcgttcaacgatttccggcatctgacgatagaagaaggtcaacagcagcgtacgaatgtgcgagccgtcgacgtccgcatcggtcatgatgatgatgctgtgataacgcagtttgtccgggttgtactcgtcacgaccgataccacagccaagcgcggtgataagcgtcgccacttcctgagaagagagcatcttatcgaagcgcgctttctcgacgttgaggattttacccttcagcggcagaatcgcctggttcttgcggttacgcccctgcttcgcagagccgcccgcggagtccccttccaccaggtacagttcggaaagcgccggatcgcgttcctggcagtctgccagtttgcccggcaggcccgctaagtcgagcgcacctttacggcgggtcatttcacgcgcgcgacgcgccgcttcacgggcacgggcagcatcgataattttgccaaccacgattttcgcgtcggttgggttttccagcaggtattctgccagcagttcgttcatctgctgttcaaccgccgatttcacctcagaagaaaccagtttgtctttggtctgggaggagaatttcgggtccggcactttcacggaaacgaccgcaatcaggccttcacgcgcatcgtcaccggtggcgctgactttggcttttttgctgtagccttctttgtccatgtaggcgttcagggtacgggtcatcgccgcacggaagcctgccaggtgagtaccgccgtcacgctgcggaatgttgttggtaaagcagtagatgttttcctggaagccatcgttccactgcaacgccacttcgacgccaataccgtctttttcagtggagaagtagaagatattcgggtggatcggcgttttgttcttgttcagatattcaacgaacgccttgatgccgccttcatagtggaagtggtcttctttgccgtcgcgcttgtcgcgcagacgaatggaaacgccggagttgaggaacgacaactcacgcagacgtttcgccagaatttcatattcgaactcggtcacattggtgaaggtttcgaggctgggccagaaacgcaccatggtgccggttttttcagtctcgccggtaaccgccagcggggcctgcggtacaccgtgttcgtagatctgacggtgaattttaccctcgcgctggataaccagctccagtttttgcgacagggcgtttactaccgaaacaccaacgccgtgcagaccgccggacactttataggagttatcgtcaaatttaccgcctgcgtgcagaacggtcatgatcacttccgccgccgatacgccctcttccgggtgaataccggtcggaatgccgcgcccgtcatcctgtacagagacagagttatcggcgtgaatggtgacgataatttctttacagtgacccgcgagcgcttcgtcgatagcgttatctaccacctcgaataccatgtggtgcagaccggtgccgtcatccgtgtcgccgatatacatacccgggcgcttacgcaccgcatccagccctttcaggactttgatactggaggagtcataagaattcgacatcaacgtttctcgctcatttatacttgggttaatccgttattttacccttttccacggtaaacatcttcgaattttcgtccgacatgtctataacgtgttcagcactgatcgcgctgacaaagacctgtgattgcgtcgcttttaagcggctggcaagcagcccgcgacgctcatcatcaagctcagaggcaaaatcatctatcaggtagagacaccgccgcccgctttcacgggtgaggaactctccttgcgccagacgtaaggcgcacatcaacagcttaagctgcccacgcgataaggtatcttccaccggcgcaccgtcggcgcgaatgcgtaagtccgctttgtgcgggccgtgcgcggtgtaggttagctggcgatcgcgttcaaaattacgttccagcacctcagcatattctgtctctttctcccagccgcgctggaaagagaaagtcagagaaaactcagggagaaattgcttacaggtatcagccatatcggccgcgataccggcgctatactccgcgcgccaggtgctgatttgctccgccagcgggatcagctctttatcccacgggcgtagctgttcgtaacgtgtcacctggcgcagcgccgcattgcgctgcttgagcaatcgcttgagattgctccaggcggtgaaaaatccgggttcgttgtgaaagcatccccagtcgaggaatgctcttctgtatttggggccgccgttgagtaaagtaaacccttctggcgttatcaactgcattggcatcaggtgcgccagttccgcgaccttatgcccgtctgtaccgtcgatgcggactttgctgtcgccctgtttgtctttggttaagccaatcgctgtctcgcgctcttcgccctgtaatcgcccgtggagaacaaacgcctcctgctcatggcgaatgacgcgaccaatctgcaaactgcgaaacgcccgaccatggccgagcgtatagatggcttccagcacgctggttttgccactgccgttggcacctaccagaaagttaaagccgggagataaggcgagatccgcggtttcaatgttgcggaaatcgcggatcaacaagcgggtgagggacattacagtctcattggcatgacaacataagccgcgctctggctggccgcatcttcaatctgcacgctggaaaccgaatcggtcagcatcatgcggacgttttcgcatttcagcgcgttcagaacatccagcacataactgacgttgaagccgatttccatctccgcaccgctataggtaacgtcgaggatctcttccgcttcttcctgttccgggttgttggcggtgattttcagctggttttcgctgacataaagacgtacgccgcggaatttctcgttagagagaatcgccgcgcgagcaaacgcctgcttgagcagatcgcagccagcttccagatgtttgtccgggttcttcggcagaacgcggcgataatccgggaagcgaccatccaccagtttggaggtgaagataaagtcgccaacgtgggcgcgaatgttgttgctgccaatctgtacgcgcagcggattgtcgccgccgtcgagcatacgcatcagttcaatcacgcctttacgcggtacgatcaccgaatggcttggcaaagattgaccaattggcattgaacagaccgccagacggtggccgtcggttgccacggtgcgcagttcttcaccttcggtttcaaacagcataccatttaagtaatagcgaacgtcctgatgcgccatagaaaactgggtcgcttcaatcagacgcttcatcgttgcctgcggcagggtaaattcgacttcactctgccagtcatcgaggttcgggaaatccgccgctggcagggtagacagcgaaaaacggctacgcccggagcgtaccagcatccgttcaccttccagctgcacggcaatttccgcgccttcaggcagaccacggcagatatcaaagaatttgcgcgccggaacggtcgtcgctcctggctcgtgtggctgaaccagcgcaacacgtgccaccatttccatctcgagatcagtaccggtcagcgacaacgtaccgtcagcaacctgtaacagcagattaccgagaatcggtagcgtaggacgaccacctaacggaccgctcacctgttgtagcggttttaataaatgctcacgttctacggtaaatttcataggtttacgatgacaatgttctgattaaatttgaaaaatcttctttgatatcgtggctctcttcacgcaactgctcgatcttacggcaggcatgaagcaccgtcgtgtggtcacggccaccaaacgcatcgccaatctccggcagactgtggttagtcagctctttcgccagcgccatcgccatctggcgcggacgcgccaccgagcgggatcgacgcttggaaaggagatccgcgactttgatcttgtagtactccgccaccgtcttctgaatattgtcgatggtgaccagtttttcctgcaatgccagcaagtcgcgcagcgcctcacgcacgaagtcgatggtgatcgcccgtccggtaaagttggcattggcaatgacgcggttcagcgccccttccagctcacgtacgttagatcgtagacgcttggcgataaagaacgccacttcgcccggcaaacgaatgtcgttttcgtcggcctttttcatcaggatcgccacacgggtttccagctctggcggttcgatcgccacagtcagtccccaaccgaagcgggatttcaaacgatcctcaacgccgttgatctctttcggatagcgatccgaggtgagaatgatctgttgattaccttccagcagggcgttgaaggtgtggaaaaactcttcctgagatcgttctttattagcaaaaaactgaatatcgtcgatcagcagtgcatctacggaacggtagtagcgtttaaactcttcgatcgcgttgttttgcagggctttaaccatgtcctgaacaaagcgctcggagtgcatataaaccactttggcattcggcttgcgcgccataatgccgttacccaccgcatgcagcaggtgagttttacccagacccgtgccgccataaaggaacaacgggttataggcaccgccagggttatccgccacctggcgagccgccgcgcgcgccagttggttagatttaccttcaacgaagttatcaaacgtgtgtttgacgtttacgttagaacgataggtcggttctgccggggccgggacgttatcccaacctgagcgcgtagaaggcgcagcacgttgcggctgcgtttgcgccacctgtgcaggggccgcgacgttgctcgtcactgccgcttgtggcgtttgcgtcaccggtttggtgccgacttcaaaacgcagctgtggggcatccgctccgcagaaactggttagcagtccattgatattattaaggtacttgtcccgtacccaatcgaggacaaaacggtttggcgcgtacagggccagcgtgttatcgctcagttccgcctgcaatgggcgtatccacatactgaattctgtggctgataactcatcctgcaatcgggcaagacactgctgccaaagcgaaagtgacacggcggactccactcgaacaaaagtcgataatgactaaggctgaaacattcatgattgttgacgtacgtcgaaaagaccctgcttgagggtgacgcacgaaccgctgtctgcggttatatgcccgatcaagatcctgcaaaacgatcgggaccgcggatcatagcctaaactgcgcaagagatcttctgtttctcacagattttcccgatttatccacaggactttccagaactcgctaagtgtaaacgatcctgccgcgaggcgggcacgatttacgccgcatattggaaaatttaatgaccatagacaaaaattggcttaatcgatctaataaagatccaggacgatccttgcgctttacccatcagcccgtataatcctccacccggcgcgccatgctggtttccactggtgtgaggtcgtacattttccctgcgaaaaggtgcggaaaagcgcggtaaataaggaaagagaattgactccggagtgtacaattattacaatccggcctctttaatcacccatggcttcggtgtccatcgtttcatttttcggcggatatccaataaagccattgaatttattcaagtttaggtagaaatcgccatgaaacgcacttttcaaccgtctgtactgaagcgcaaccgttctcacggcttccgtgctcgtatggctactaaaaatggtcgtcaggttctggcacgtcgtcgtgctaaaggccgcgctcgtctgaccgtttctaagtaataaagctaacccctgagtggttaagctcgcatttcccagggagttacgcttgttaactcccagtcaattcacattcgtcttccagcagccacaacgggctggcacgccgcaaattaccattctcggccgcctgaattcgctggggcatccccgtatcggtcttacagtcgccaagaaaaacgttcgacgcgcccatgaacgcaatcggattaaacgtctgacgcgtgaaagcttccgtctgcgccaacatgaactcccggctatggatttcgtggtggtggcgaaaaaaggggttgccgacctcgataaccgtgctctctcggaagcgttggaaaaattatggcgccgccactgtcgcctggctcgcgggtcctgatagccctcattcgggtctatcaacgcctgattagtccgctactcgggccgcattgtcgtttcactccaacctgttcaagctacggaattgaggcattgcgcaggtttggagtgataaaaggcagttggttgacggtgaaacgcgtattaaaatgccaccctttacaccctggtggtgacgatcccgtcccgcccggaccatttgataccagagaacactaacgatggattcgcaacgcaatcttttagtcatcgctttgctgttcgtgtctttcatgatctggcaagcctgggagcaggataaaaacccgcaacctcaggcccaacagaccacgcagacaacgaccaccgcagcgggtagcgccgccgaccagggcgtaccggccagtggccaggggaaactgatctcggttaagaccgacgtgcttgatctgaccatcaacacccgtggtggtgatgttgagcaagctctgctgcctgcttacccgaaagagctgaactctacccagccgttccagctgttggaaacttcaccgcagtttatttatcaggcacagagcggtctgaccggtcgtgatggcccggataacccggctaacggcccgcgtccgctgtataacgttgaaaaagacgcttatgtgctggctgaaggtcaaaacgaactgcaggtgccgatgacgtataccgacgcggcaggcaacacgtttaccaaaacgtttgtcctgaaacgtggtgattacgctgtcaacgtcaactacaacgtgcagaacgctggcgagaaaccgctggaaatctcctcgtttggtcagttgaagcaatccatcactctgccaccgcatctcgataccggaagcagcaacttcgcactgcacaccttccgtggcgcggcgtactccacgcctgacgagaagtatgagaaatacaagttcgataccattgccgataacgaaaacctgaacatctcttcgaaaggtggttgggtggcgatgctgcaacagtatttcgcgacggcgtggatcccgcataacgacggtaccaacaacttctataccgctaatctgggtaacggcatcgccgctatcggctataaatctcagccggtactggttcagcctggtcagactggcgcgatgaacagcaccctgtgggttggcccggaaatccaggacaaaatggcagctgttgctccgcacctggatctgaccgttgattacggttggttgtggttcatctctcagccgctgttcaaactgctgaaatggatccatagctttgtgggtaactggggcttctccattatcatcatcacctttatcgttcgtggcatcatgtacccgctgaccaaagcgcagtacacctccatggcgaagatgcgtatgttgcagccgaagattcaggcaatgcgtgagcgtctgggcgatgacaaacagcgtatcagccaggaaatgatggcgctgtacaaagctgagaaggttaacccgctgggcggctgcttcccgctgctgatccagatgccaatcttcctggcgttgtactacatgctgatgggttccgttgaactgcgtcaggcaccgtttgcactgtggatccacgacctgtcggcacaggacccgtactacatcctgccgatcctgatgggcgtaacgatgttcttcattcagaagatgtcgccgaccacagtgaccgacccgatgcagcagaagatcatgacctttatgccggtcatcttcaccgtgttcttcctgtggttcccgtcaggtctggtgctgtactatatcgtcagcaacctggtaaccattattcagcagcagctgatttaccgtggtctggaaaaacgtggcctgcatagccgcgagaagaaaaaatcctgattcggtgagttttcgctaaaataagggcggtcagttgaccgccttttttcttttcgtagggcggataagcaccgcgcatccgccacacaaagcaacaggaacatcatgagcgataatgacactatcgtagcccaggccacgcctccgggacgtggcggcgttggcatcctgcgcatctccggcttcaaagcccgtgaagttgccgaaaccgtgctgggtaaactgcctaagccgcgctacgccgattatcttccgtttaaagacgccgacggcagcgtgctcgatcaggggattgcgctatggttccctggcccgaactcgttcaccggcgaagatgtgctggaactgcaaggtcatggcggtccggtgatcctcgacctgctgttaaaacgcattctgaccattcccggcctgcggattgctcgccctggtgagttttccgaacgcgcgtttcttaacgataaacttgacttagcccaggccgaggcgattgccgatcttatcgacgccagttcggaacaggcggcccgttcggcacttaactcgctgcaaggcgcattctccgcacgggttaatcatctggtagaagccctcacccacttgcgcatttacgtcgaagcggcaattgatttccccgatgaagagatcgatttcctctccgacggaaaaattgaagcccagctcaatgacgttattgccgatcttgatgcagtgcgtgctgaagcacgtcagggtagtttgttgcgcgaagggatgaaagtggtgattgccggacgtcctaacgccggtaaatcgagcctgttaaacgcgctggcggggcgtgaagcggcaatcgtaaccgatatcgccggaactacgcgtgacgtgctgcgtgagcatatccacattgacggaatgccgctgcatatcatcgataccgccgggctacgtgaagccagtgacgaagtagaacgtattggtatcgagcgcgcgtggcaggaaattgaacaggccgaccgcgtgctgtttatggtcgatggcaccacaacagacgccgtggatccggcagagatctggccggaatttattgcccgtctgccagcgaaactgccgatcaccgtggtgcgcaataaagccgatatcaccggcgaaacgctgggaatgagtgaagtgaacggtcacgcgttaattcgtctctcggcaaggactggtgaaggcgtggacgtgctgcgtaaccatctcaaacagagcatgggctttgacaccaacatggaaggcggcttcctggcgcgtcgtcgccacctacaggcgctggaacaggcagcggaacatctacaacagggcaaagcgcaactgttgggagcctgggcaggtgaactgctggcggaagagttgcgtctggcacagcagaacttaagcgaaatcaccggggaatttacttcagacgacctgctggggcggattttctccagcttctgtattggtaagtaaccgcgcttacgaagccgcattctgactgtcagatgcggcttcgcttcattgttaccactcctgttattcctcaaccctttttttaaacattaaaattcttacgtaatttataatctttaaaaaaagcatttaatattgctccccgaacgattgtgattcgattcacatttaaacaatttcagaatagacaaaaactctgagtgtaataatgtagcctcgtgtcttgcgaggataagtgcattatgaatatcttacatatatgtgtgacctcaaaatggttcaatattgacaacaaaattgtcgatcaccgcccttgatttgcccttctgtagccatcaccagagccaaaccgattagattcaatgtgatctatttgtttgctatatcttaattttgccttttgcaaaggtcatctctcgtttatttacttgttttagtaaatgatggtgcttgcatatatatctggcgaattaatcggtatagcagatgtaatattcacagggatcactgtaattaaaataaatgaaggattatgtaatggaaaactttaaacatctccctgaaccgttccgcattcgtgttattgagccagtaaaacgtaccactcgcgcttatcgtgaagaggcaattattaaatccggtatgaacccgttcctgctggatagcgaagatgtttttatcgatttactgaccgacagcggcaccggggcggtgacgcagagcatgcaggctgcgatgatgcgcggcgacgaagcctacagcggcagtcgtagctactatgcgttagccgagtcagtgaaaaatatctttggttatcaatacaccattccgactcaccagggccgtggcgcagagcaaatctatattccggtactgattaaaaaacgcgagcaggaaaaaggcctggatcgcagcaaaatggtggcgttctctaactatttctttgataccacgcagggccatagccagatcaacggctgtaccgtgcgtaacgtctatatcaaagaagccttcgatacgggcgtgcgttacgactttaaaggcaactttgaccttgagggattagaacgcggtattgaagaagttggtccgaataacgtgccgtatatcgttgcaaccatcaccagtaactctgcaggtggtcagccggtttcactggcaaacttaaaagcgatgtacagcatcgcgaagaaatacgatattccggtggtaatggactccgcgcgctttgctgaaaacgcctatttcatcaagcagcgtgaagcagaatacaaagactggaccatcgagcagatcacccgcgaaacctacaaatatgccgatatgctggcgatgtccgccaagaaagatgcgatggtgccgatgggcggcctgctgtgcatgaaagacgacagcttctttgatgtgtacaccgagtgcagaaccctttgcgtggtgcaggaaggcttcccgacatatggcggcctggaaggcggcgcgatggagcgtctggcggtaggtctgtatgacggcatgaatctcgactggctggcttatcgtatcgcgcaggtacagtatctggtcgatggtctggaagagattggcgttgtctgccagcaggcgggcggtcacgcggcattcgttgatgccggtaaactgttgccgcatatcccggcagaccagttcccggcacaggcgctggcctgcgagctgtataaagtcgccggtatccgtgcggtagaaattggctctttcctgttaggccgcgatccgaaaaccggtaaacaactgccatgcccggctgaactgctgcgtttaaccattccgcgcgcaacatatactcaaacacatatggacttcattattgaagcctttaaacatgtgaaagagaacgcggcgaatattaaaggattaacctttacgtacgaaccgaaagtattgcgtcacttcaccgcaaaacttaaagaagtttaattaatactacagagtggctataaggatgttagccactctcttaccctacatcctcaataacaaaaatagccttcctctaaaggtggcatcatgactgatcaagctgaaaaaaagcactctgcattttggggtgttatggttatagcaggtacagtaattggtggaggtatgtttgctttacctgttgatcttgccggtgcctggtttttctggggtgcctttatccttatcattgcctggttttcaatgcttcattccgggttattgttattagaagcaaatttaaattatcccgtcggctccagttttaacaccatcaccaaagatttaatcggtaacacctggaacattatcagcggtattaccgttgccttcgttctctatatcctcacttatgcctatatctctgctaatggtgcgatcattagtgaaacgatatcaatgaatttgggttatcacgctaatccacgtattgtcgggatctgcacagccattttcgttgccagcgtattgtggttaagttcgttagccgccagtcgtattacctcattgttcctcgggctgaagattatctcctttgtgatcgtgtttggttcttttttcttccaggtcgattactccattctgcgcgacgccaccagctccactgcgggaacgtcttacttcccgtatatctttatggctttgccggtgtgtctggcgtcatttggtttccacggcaatattcccagcctgattatttgctatggaaaacgcaaagataagttaatcaaaagcgtggtatttggttcgctgctggcgctggtgatttatctcttctggctctattgcaccatggggaatattccgcgagaaagctttaaggcgattatctcctcaggcggcaacgttgattcgctggtgaaatcgttcctcggcaccaaacagcacggcattatcgagttttgcctgctggtgttctctaacttagctgttgccagttcgttctttggtgtcacgctggggttgttcgattatctggcggacctgtttaagattgataactcccacggcgggcgtttcaaaaccgtgctgttaaccttcctgccacctgcgttgttgtatctgatcttcccgaacggctttatttacgggatcggcggtgccgggctgtgcgccaccatctgggcggtcattattcccgcagtgcttgcaatcaaagctcgcaagaagtttcccaatcagatgttcacggtctggggcggcaatcttattccggcgattgtcattctctttggtataaccgtgattttgtgctggttcggcaacgtctttaacgtgttacctaaatttggctaaatccttcaagaagccagccattcgctggcttcttgcctctcaggaaatcacttatgtccaaatggcaactcgcctgatcctccttcaccacgtatgctttgcgtcaccttactatcaggacgctttagcccatgtcccgctttttgatttgtagttttgccctggttttactttatcccgccgggattgatatgtacctcgttggtttaccgcgcatcgccgccgatctcaatgccagcgaagcgcagttgcatattgcgttctccgtatatctggcggggatggcagctgcgatgttatttgccggtaaagtggccgatcgttcagggagaaagccggtcgccatacccggcgcggcgctatttattattgcctcggtgttctgttcactggctgaaaccagcacgttatttcttgcaggccgatttctacaggggttgggcgcaggctgttgttacgtagtggcgttcgctattttgcgcgacacgctggatgatcgacgtcgggctaaagtgctgtcattactcaacggtattacctgcatcattccggtgttagcgccagtgctcggacatctgattatgcttaaattcccgtggcagagtctgttctgggcgatggcaatgatgggcatcgcggtactgatgttgtctttgtttattttaaaagaaacgcgcccagcggcccccgcagcttcggataaaccacgagaaaatagcgagtcgctgcttaaccgttttttcctcagccgtgttgttatcaccaccctcagcgtttcggtgatcctcactttcgtcaacacgtcaccggtattgctgatggaaatcatggggtttgagcgcggtgaatacgccaccattatggcgctgaccgctggcgtcagcatgaccgtttcattctccacgccatttgcgctgggaatttttaagccacgtacgttgatgatcacctcgcaggtgttattcctggcggcggggatcactcttgccgtttcaccttcccatgcggtttctctgtttggtatcacgctgatttgcgccggtttctcggtaggttttggtgtggcgatgagtcaggcgttagggccgttttcattacgcgcgggcgtagccagctcgaccttaggtattgcgcaggtttgcggttcgtcactgtggatttggctggcagcggtggttggtatcggcgcatggaatatgctgatcgggattctgattgcctgtagcatagtgagcctgttgctgattatgttcgtcgcgcctggacgccccgttgccgctcatgaagaaatccatcaccacgcttgatctcaatctgctgctttgtctgcaactgctgatgcaggagcgcagcgtaaccaaagcggcgaagcggataaacgtgacaccttcggcggtgagtaagtcgctggcaaagttaagagcgtggtttgacgacccgctctttgtgaactcaccgctgggtctgtcgcccacaccgctgatggtcagcatggagcaaaatctggcggagtggatgcaaatgagcaacctgctgctggataaaccgcaccaccagacaccgcgcggcctgaagtttgagctggcggcggaatcaccgctgatgatgatcatgcttaatgcgctgtcgaaacagatctaccaacgttacccgcaggcgaccatcaaattacgtaactgggattacgattccttagatgccattactcgtggtgaagtggatatcggtttttccggtcgcgaaagccatcctcgctcgcgggagctgttaagctcgctaccgttagccattgattatgaagtgctgtttagtgatgtgccctgcgtctggttacgcaaagatcatccggcactgcatcaaacgtggaatctggacaccttcttacgttatccgcatatcagcatttgctgggaacagagcgatacctgggcgctggacaatgtgttacaggagctgggacgcgaacgcacgattgctatgagcctgccggaattcgagcagtcactgtttatggcagcgcaacccgacaatctgctactggcgaccgcgccgcgctactgtcagtactacaatcaactccatcaactgccgttggttgctcttcctctcccgtttgacgaaagccagcaaaaaaagctggaagttccttttaccctgctgtggcataaacggaacagccataatccgaagatcgtctggttacgggaaaccattaaaaacctttacgcgtcgatggcataaccgaatcgtatgaaacgcgacccaatttcacaataaaatgtaaaaaagttgtaataagcttgtctgaatcgaacttttagccgctttagtctgtccatcattccagtaaatgattactcttgtattcataatggaccattaagcatggagcgaaaaatggcgactcactttgcccgagggattttaacggaaggacatctgatttctgttcgtctcccctcccagtgtcatcaagaagcccgaaacattccccctcatcgtcaaagccgttttctggcgtccagaggtttactcgcagaactgatgttcatgctgtatggcattggcgaattgccggaaatcgtcaccctgccgaaaggtaaaccggttttcagtgataaaaatttgccttcgttttccatttcctatgccgggaatatggttggcgtggcgttaacaaccgaaggtgaatgtggcctcgatatggaactacagcgtgcgacgcgcgggtttcatagcccacacgcgcccgataaccacaccttttccagcaatgaatcgctatggatcagtaaacaaaacgatcctaacgaagcgcgggcgcagctcatcacgctgcgccgaagcgtgctaaaactaaccggtgatgttttgaatgacgatccgcgcgatctgcagctgctgcccattgccggacgcctgaaatgtgctcatgtaaatcatgtagaagcgttatgcgacgcggaagacgtgctggtgtggtccgtggcggtcacgcccacgattgaaaagctcagtgtctgggagttagatggcaaacacggctggaaaagcctgccggatattcacagccgcgccaacaatcctaccagccggatgatgcgttttgcccaactctctaccgtgaaggctttttcgccaaattgatagacaaccacaggagtcatcatgtctgaaaaattgcaggtggttacgttactggggagcctgcgcaaaggctcatttaatggcatggttgcacgtaccctgccgaaaattgctccggcgagcatggaagtcaatgcgttaccatccattgccgacattcccttgtatgacgctgacgtacagcaggaagaaggttttccagcaacggttgaagctctggcggaacagatccgtcaggctgacggtgtggtgatcgtcacgccggaatataactactcggtaccgggtgggctgaaaaatgccatcgactggctttcccgcctgccggatcaaccgctggccggtaaaccggtattgattcagaccagctcaatgggcgtgattggcggcgcgcgctgtcagtatcacctgcgccagattctggttttcctcgatgcaatggtgatgaacaagccggaatttatgggcggcgtgattcagaacaaagttgatccgcaaaccggagaagtgattgatcagggtacgctggaccacctgaccgggcaattgaccgcatttggtgagtttattcagcgagttaagatctaaataaaaaacccgccagcaatcatgcatggcgggtttttaacgcgctatcgattttagtgagcgtcgataaagacaatcttcaggataaacagcagcgcaacgatgattacgcacgggcttagatcacgcagacgtccggtaccgattttcatcacgcagtaggagataaagcccagcgcgataccttcggtaatcgagaagctgaacggcatcatcacggcggtaataaacgccggaacagattcagtaagatcctgccagttcacgcgtgccagactggaagtcatcagcacgccaacgtaaatcagcgcaccagctgcagcgtagcctggcaccatccccgccagcggcgacagaaagataaccagcaggaacagcagaccaacaaccactgccgtcagaccggtacgaccgccaaccgatacgccggaagaggactcaatataagccgtaacggaagaagtaccgataaacgaaccggtcacggaagagatactgtcgacatacagcgcctgcttcatgcgcgggaatttccccttctcatccgccagacctgctttatcggtcacgccaatcagcgtaccggaggagtcaaacaagttgaccaacatgaaagagaaaatcacccctgccagcccgaggttaaacgacccggctaaatctacatgacccacaactgtcattacgctcggcggcgcagaaacgatgccattgtagtgcacatcacccagcatccagcccagcagcgtcgtcaccacgatagaaaccagcaccgctgcgtgaatgttgcgcgaggccagaatagcaatgatgaagaagccgaggatacccagaagtacgctgtgagaagtcagattaccgatgctcaccagcgtttccgggttagcgacaatcacacctgcgtttttcagccccatcatgccaatgaacagaccgataccgctggtaatacccacacgcagactcaccggaatgttggctatcatccagtagcgaacgcggaaaatcgtcagtaacagcagacctatcgcgccccagaagattgcgcccatcccgacctgccacggcaagcccatcgcctgtacaacgacaaaagcgaagaacgcattcaggcccatagcgggtgccagtgcaactggcaggttagcaaacagtcccatcataatactgccgaatgcagcgatcagacaggtagtgacgaagacggcgctggtatccatgccagcaacgccaagaatttgcgggttaacaaaaacgatgtaaaccatcgtcaggaaggtggtaaaaccggcgatcacttcggtccgtgccgtcgtgccatgttcgcgcagtttaaacacgcgttccagcatcccctgaccagaagtctgggtggtatgttgatgactcattatctatttccgaacaaggagggaaaatccgtcgctatcgtataccaaaatgcgacaataggcgcgtttgtgagagacttttttattggatttacttatacggcaacgattgcgttgcgcaaatcggctctacgaaaacgttaaactgattaaaaaggaaaggcatgtcccggatagaagcggtatttttcgactgcgacggtacgctggtcgacagtgaagtcatttgctctcgcgcatatgtaacgatgtttcaggaatttggtattacgctcgatcctgaagaggtattcaaacgtttcaaaggtgtaaaactgtacgaaattatcgatattgtttcccttgaacatggtgttacgttagcgaaaacagaagctgaacacgtttaccgtgcagaagtcgctcggctgttcgattcagaactggaagccatcgaaggggctggagcgctcctgtcagcgatcactgcgccaatgtgtgtggtatctaacggcccaaataacaaaatgcagcattctatgggcaagctgaatatgttgcactacttcccggataaactgttcagcggctacgatattcagcgctggaagccagacccggcgttaatgttccatgcggcaaaagcgatgaatgtaaatgtagaaaactgcattctggttgatgactcagttgccggtgcacaatctggtatcgacgcaggtatggaagtgttctacttctgcgccgacccgcacaataagccgatcgttcacccgaaagtcaccacctttacccatctttcgcagttacctgaactgtggaaagcgcgtggttgggatattacggcatagttcttcacactcccttcacttaccccgcttaaattggcgctcaaaggtaagtaaagggagtttgatatgtctgtttcacgtcgggtaatacatcacggactttattttgcagttttaggaccgttaattggtgttctgtttcttgtcctctacatattcttcgcaaaagaaccgctggttctttgggtgataatacatccaatttttctcttattgtcgataactacgggagctattcctgcgttgttaaccggtgtaatggttgcctgtctgccggaaaagatcgggtcacagaaacgttatcgttgtctggctggtggcataggtggcgtcgttatcaccgagatctattgtgcagttattgtacatattaagggcatggcttcctcggagttgtttgaaaacattctttctggtgacagtctcgttgtccgcatcattcctgcattgctggcaggtgtggtgatgagcagaatcattacccgtctacccggattggatatttcatgtcctgaaacagactctttaagttaagcgggatactttatctttgggctactcaaaagcagacaggatgtttctatgactcaaaatatcaggccgttaccccaattcaaatatcatcccaagccactggaaacaggcgcatttgaacaggataaaaccgtagagtgcgattgctgtgaacaacagacgtcagtttattactcgggtcccttttattgcgttgatgaagttgaacatctctgtccgtggtgtattgcggacggttctgctgctgaaaagtttgcaggtagttttcaggatgatgccagcatagaaggtgttgaatttgagtatgatgaagaggacgaatttgccggtattaagaacacatatcctgatgaaatgctgaaagagttggttgaacgcacgccaggttatcatggatggcagcaggaattctggctcgcgcattgtggcgatttctgtgtttttatcggctatgtgggctggaatgatataaaagatcgcctcgatgaatttgccaaccttgaagaagattgtgagaatttcggtattagaaattctgatctagctaaatgcctgcaaaagggtggtcattgtcagggttatctcttccgctgtctccactgcggcaagctgagactgtggggtgatttttcgtagttatttaaataatgagaacaggccggagcgtaattcacacatccggccttatttcttaagcttaaccgagtgctaattctgcggcagcggctttatcagcgattaccatcagcgaaggatgcagctgcaacacggaagctggaacatcttcggtaaccggaccttgcagaacatttttcagtgcctgcgctttacccgcgccgctgacaattatcagcaagtttttcgccgccatgatgcttttcggccccatcgtcacgtagctgtcaggcactaacgaaaagtcgccgcccaactcgccatgcgccacaatatcaaccatctctccctggatcgggaactccacggtttgctcatggaaatgggtcgtattcggcaaattgccacaaaaatgaccatctgcacctaatcccagcaccaccaaatccagtccgccttcacgcgccagtttctgatcatgctcgcggtagttatcaatagtgagcttctggatattctcttctttgatccccgcaggggtgaaaaacagattacgcagattggtaatcgttacgccttctccctctttgccgcgaaatggaatttcatcaaaattatagaaatagcagttatcgtaccagggcttacctttaaccagggtggtgaggtattcatacatgcctttgggcgtgctaccggcggtaattgccaggttaacacgacgcgtcttcgacatataaccaagcagatggtgtgccgcgacacggctcatttcctggtaatcttcggtaatgattaatttcatcttaatgccttattttatttaaataatttctgtacaaaggctgcataggctggtcgccagacatccatttcatggttcagacccggatattcctggtaatcaaagttaatttttttctgctcaagctcagttttcagcccggcgatatccttgccggttacgacatctttatcccccacaaccacagtaaaattacgtagttgctggttgatagctgccggatcgttcagtcgggccgcgacaccttcatccggtacggttgtcgtggtaacaccactgaatgtggccagccagccaaagctttccagatgattcattccggaaaccagcgcctggtacccgccttgtgaaagccctgccagcgcgcggccatcggcatctttacggacattaaaacgcttgctaatcagcgggataatatcgttcatcagttcgcgatctgccgctttagcattcagcggataaaagactttacgtctttcctgaggcacgaaatcttcgggaataatgcccttcgcatcggtttctgtatccgggatcaccaccagcatcggtttaattttcccttcagcaagcaggttatccatgatttgcgggatacgcccctgatcgatagcggaacgtccggtatcaccaaagccgtgatagaaatagagcactggcaaaggctcgcccatgccggtgtatcctggcggggtccagacatacatctgacgttcagattgcaatgcgttggagtggtaagttatggcgatcaaatcaccatgcgcaacagaacgcgtatccagataactgcctggcaccagaatcatactggagttaacctggcgctgaggattagtcattgcggtgcctgtatcaatgctgcgtacaccatcaacattgaaaaaatactcgtacaggttgcctttcaggataggtgtgcgccacgaccagactcctgcttcgtctttggtcatcgggtgaatattgtccggaaccggaacacccaccactacagagacattttttgccccaggggcaaagtagcgaaaggtcacgctgttatcggcattgacctgagtcacatactgtttcaccgggatagtgggtgccgggctggctggcatatccgctgctatggcccactgagcagaaataccgctggcaatagccagcgttaaagcagcaatttttatattcatcgtaatattcctttcattaagttccattaccaccagatttcagcctgggcaccgacagcaaactggtcgtctttattgtcttcaaaggtgaagccatccagttcgttttccagggctttgatatacgtggcgtagaaacgaatttccggacgcgaggtcaacatactggtattgactttaaaggtatggaagagcgtggttttataaccagactcattaaatttattactattcgcatctttgttttgctgggtgaaatagcccagttcaacacctgtctggttatattggtcccaaatataggccgggcgaacaaccgcacgaatagattcgaaatcagagtgggcgcctgtttcgtagctatatatatcgttaccgaaggagtaaacaatcgcgttagctacaatgaaatgatcgccaatataggcttcgccctgcgaagtcagacgtaccgctgttccgccggtgtgatcaccataataacgaccattaaaggtggtaaatggacttgcgccagcataacggccaaagttactggcgatagagttattcgcgaccaggaaggagaattcgttgaagccacctttatcaaatttctgcgttaaagatgtgccaaacatccaggtatctttccagtcataatacccgttattatcctgattatctttttccgatgcgctttcgtttgccgtgacataacgaccacttaccattaaggtggctttatcccataacgggatatctttatagcgtaaatcaatggtattggtattaatctgctgtttgttttgcaggctgcgatcgtaatcatcgacatcttcgcgaaccagcgcgatatcaattttacccggaccgactttccagttttccagacctacacccgctgcggcatcagtacgctgcgttttccagtcaagcatctggatttcaattttcggcgcaccgtgtttacccacccagaaatcagcctctggcgcaaagggcaggaaacctttggtggtaacgtacatatcggagaactgcatatagttctcgccaccggcgttatcgccaaaccagccggtagagtactgctgaccaacgttaccatccatcatcacaacggcatcaacccgtttgccgttttcgttgtagacacgttgttttaactgcaaatcaaaccagccggagtattcgttaccaaagcggcccagagaaccaatcgcccatgatttaggtgaaccatgagaggcggtcccccaaccagaacggtaatagccgttgtaactaaagccaatttcatctttcacaaatttactgaaatctttcagagtcatggaagaataaatcgagcctgtctcactggcatttttctcttcatttttgaccagtacagcatcaggttttgcggcactactggtcgggaacggattggcggcatacccttgatcattcgtacttacgctacgattcaccgtcgctggcgtatactttttcttctcttcatctttatactttttgagttcgctttgcgtttctcttaacgccttttctaataactcaaggcgttgttccaccgttaatgattcagccaatgattgtgcagaaaaggctaacggtgccattaataagatggcagaggtaataagatttcgtctaaacataatatccctttatggtgcaaagaaagaattaacgcatcgcatccagactgttctgaatgcgacgataattaaggtgctttaatggttattttttttaatgacagcccccgcgtcttgatcacctctgcataccatccgaagcttttcttgcgtgttcttgtgaggcttccttcgccattatcatcacgatccacataaataaagccgtagcgcttagacatttgtgaatgagatgcactgactaaatcaattggcccccaactggtgtaccccataatatccacaccatcggcaatcgcttcatttacctgtaccaggtgatcgtttaaataggcaattcgataatcgtcctgtatcgaaccatccgcttcaacgctgtcttttgcgcctaatccgttctcgacaataaataacggtttttgataacgatcccaaagcgtatttaacagaacccgtaatccaaccggatcaatttgccacccccactctgaacttttcagatgcggattggggatcatattcagtatgttgccctgcgcatttttattaatgctttcgtcgtgggaaacacaaccagtcatgtaataactaaaagagatgaaatcgacggtatgttttaaatcttctgcgtcactttcagtcatctcaatggtgatattgtggtcgcggaagaaacgctgcatatagccgggatactggccacgcgcctgaacatcaccaaagaacatccagcgccggttctcttccatggcctgcaacatatcctgtggctggcaggtgagggggtaaaccagcccaccgagaagcatattgccgattttcgcttcggggagcaggctatgacaggctttaactgcccgcgcactggcaaccagttgatggtggatagcctgataaacttccgcctcgccactctcttctgccagccccacgcccgtgaatggcgcgtgtaacgacatgttgatttcattaaacgtcagccataacgccactttatgttggtagcgagtaaagaccgtgcgggcgtaatgctcgaagtgatcgatgaccgctcgattagcccaaccgccgtagtttttcaccagcccatatggcatttcgtaatgggataacgttaccagcggcttgatccccgcctgcgccatttcatcaaacagccgatcgtaaaacgctaaccccgcttcattcggttcgacttcgtcgccctgagggaaaattcgcgcccaggcaatggaaatacgcagacaggtgaagcccatctcggcaaataacgcgatatcttccgggtaacggtgataaaaatcgatggcgacatctttgatattctctttccccaggatgcgcggttccatttttcccattacgccatgaggctgtaaatctgaggtcgagatccctttgccatcttcctgccaggcaccttccacctgattggcagctgttgcgccaccccaaagaaatgtttctggaaatgctttcataattaactccttttatcgttagcgaatgatggataacagcggttcacctgcgcttatctgcgccgtgccgtggggtaatacgtccgtaaaatcatcgctattactgattaataccggcgtcgtcagatcaaatccggcctcgcgaatagcagggatatcaaaagaaatcagccgatcgcctgtattgaccttgtcacccacgttgacgtgagcggaaaagaatttgccgtccagttttacggtgtcgataccgacatgaatcaggatctccacaccatcatctgactcaatgccaatggcgtgtaatgtggcgaacaacgaagcaattcgacccgcaaccggagaacgcacttcaccaaccgagggcagaatggcaatacctttacccaacaggccactggcaaacgtggtatcagcgacgtgaatgagcggcacaatctctcccgtcatcggtgaacagataccgccctgctcaggtggtgtaataacctctggtgttttctcttgcggggcaccctgcgctggctgacgtttagcggtgatgaaatgaagcatcaccgtaccgacaaatgcgcaaccgatggcaatgacaccgccaataacgctggcccagacggtgaaatcaattcccgttgacgggatggtttgcatgaaggtgaaaatacttggcaaaccaaaggagtagactttcgtttgcgcgtagccaataatggtggcccccaaagccccactgatacaggcgataacaaaggggtacttacgcggcaggttgacgccatataccgctggttcggtgataccaaacagactcgtcaacgccgctgatcccgccaccacttttttctgcgcatcgcgttcgcagaggaagacgccgagcgccgccccgacctgcgccataatggcgggcattaacagcgggatcatggtgtcgtagcccagcacggtgaagttattgatacacagcggcaccaggccccagtgcagtccgaacatgacgaagatttgccagaagccgcccattaccgcgcccgcaaatgcaggaaccgcctgataaagccagagataaccggcggcaatcagttcgcttatccaggttgatagcggccccaccagcagaaaggtgacgggtgtgataaccatcagacatagcaatggtgtgaagaaatttttgattgccgacggtaaccacgcattaagtcggcgttccagaatgctgcacaaccaggcagaaaaaataatgggaataaccgatgacgagtaattcaacaatgtgaccggaatacccaggaaatccagccccagcgcatccgctttttgcccgttctcgaaagcagtcagaattaatggatgcactaacgctccaccaatcaccatggcagtaaatggattaccgccgaagcgtttccccgcggtgtatcccaggattatcgggaagaaccaaaacaaggcatcactggcgctgaataaaattaaataagtaccactttgttcggtcgtccactgaaaagtgagcgccagagccagcatacctttcaagatcccggttgccgccatcaaaccgatcagaggcgtaaaaatacctgaaataacataaacaaagcggtttagcagattacctttatcatcattttccggtgcctgttgcgctttttcgtcaaggcctgccacactgttaaccgccaggaagacatcggccacatggttacctatgaccacctgaaactggccaccgctttccaccaccataataataccgggggtctttttcagtacctctgcttgcgctttgctttcatcctttaatttaaaacgtaatcgcgttgcgcaatgcatcagactcacaatgttatctgcgcccccgactcctgcgactatttttctggctaactccgtcataacttgccctctaccgctttgcggcaaaactccaaaaaaaaacctgaaaaaaacggcctgacgtgaatcaagcaatttttttcaggttttgcccgcttagtgcggtaacaatcctttactcagtaataatatttcagtgttctttgcgcacgcgctctatatttatggctaaaaacataatctctgcgggtgaaattttacgttgatactgcaaaccaataaaaatggcgatccgttccgcacattgccatgcttgcgggtaattttgttttactgcttgttgtaatgattcatcactatcgttaattgaagcatgttcaagaatacgccaggataaaaacttcagatgtgtaaccagtcgctgataactcaagctttcttcctggtaattaaggctgaactgaaattttattaattgcagcatttcgcgcattaactgcgtgacacctgcaacatcctccatatttccgctcatttgggcactgaccagatgcatggcaataaagcccacttcatctttcggtaactgcacgcccaaccgtttatcaataatggttaacgcttcttcccctagctggaactctttcgggtaaagccgctggatatcccacagcaacgggttgggcagcaacacgttttgctgaaagcgtttaatcgcaaactggcaatggtcagttagcgagatataaatactgtcctgtaattttcccaagcgctcctgcgctaaagagataatacgatcacaggttgccatcacctcaagaggaatatgacttaagagttcgcttaatcgcccgttcagttcatgactgctcaaggcatactctttttctattccacttgagttaattctttcgccagcgcgtttttgaaagccaattccgcgccccatgacgactttttcccgctgttgatcatcaataaccaccacaacattattgttgagaattttggtgatttgcatgttcatagcaaggaccttttttataaacaaaaaaacccgacttcaccagtattctctggttatgtcaggttttgcctgcgaatgcagtaacaatccagtcatttattaatggtttttataacgaacatccaggttcggaaattaatttaattgcgtgcagagaaaatagcaatgcgctattgataaaaatatgaccatgctcgcagttattaactttgtgtaattttaggaatttataaagttatatataacaaatcccaataattaagttattgggatttgtctggtgaattatttgtcgctatctttccccgccagcagtttatccagctcatcgccaccgacgtgacggaaatcctgccccttcacgtagtagaagataaactcacaaatattctggcagcggtcgccaatacgttcgatagaacgcgcgcagaacagcgcagtaagtacgctcggaatggtacgcgaatcttccatcatgtaggtcatcagttgacgaacaataccttcgtattcctgatcgacttttttatcttcacgataaatacgtaccgcttcgtcaatgtccatccgcgcgaacgcgtccagcacgtcgtgcagcatctggatggtatgacggcccagcgactccagacttaccagcaacggctgatgctgctgggagaatttctccagcgcagtacggcagattttgtccgccacgtcgccaatacgctccagctcggcaatggttttactgatcaccataaccagtcgcaggtcgctcgccgtcggctgacgtttggcgataatgcgcacgcaggcttcatcgatcgccacttccatcatgttgacgttcttgtcgccttcgatgacgcgcttcgccagatcgctgtcctggttatgcatcgcggtgattgcatcagaaagctgctgctccaccatgccgcccatggtcatcacctgcgtgcggatactttccagttcggcgttgaactggccggaaatatgtttattaagattgagactgtccataacgcactcctgaatcaaccgtaacgaccggtgatgtagtcttctgtttgtttcttcgctggcttggtgaacagatcgtccgtgttgctgaactcaatcaattcgcccaggtacataaacgccgtgtggtcggaacaacgcgcagcctgctgcatgttgtgggtgacgatcaccacggtgtaatcctgcttcagttcggtgatcagctcttcaatacgcccggtagagatagggtcgagcgccgaacacggttcgtcgagcagcagcacttccgggcgaatggcgataccacgcgcaatacacagacgctgttgctgaccaccagagagagagtaaccgctctggtgcaatttatctttggtttcgttccacaatgcggctttggtcaatgcccactgcacgcgctcgtccatgtcggcacgggagagcttctcaaacagacgaacgccaaaagcgatgttgtcgtagatggacatcggaaacggcgtcggtttctggaacaccatgcccactttcgcacgcagcagtgcgatatcctgagagttggtcaggatgttgtcgccatcaagcagaatttcaccttccgcacgctgctccgggtacagttcaaacattttgttgaaggtacgcagcagcgtcgatttaccgcagccggacggcccgataaacgccgttacctggtttttagcgatatccaggttgatgtttttcagggcatggaatttgccgtagtagaagttcaaattacgaacctgaattttactcggggcagtttcaaccatactcattgcaatcttttcctcatcgtgcctgatgcacttcgctaatcaggcttaccgtaggccggatcaggcgttcacgccgcatccggcaaagtgttaaccgtgtacagagtcaaaaaggcgctcggtcggtcccctcgcccctctggggagagggttagggtgaggggaaaaccgtgtcagcaatatcaaccgtgtttattcttcgcaaaaacaacgcgcgccagaatgttcagcagcagtacgcacagggtaatgatcaataccccggcccaggccaattgctgccattccgcaaacgggctcatcgcaaacttaaagatcgtcaccggcaggttggcgatcggctgcatcatgtccgtgctccagaactggttggagagcgcggtaaacagcagcggcgcggtttcaccagcaatacgggcaatcgccagcaggataccggtcataatcccggacaccgacgctttcagcgtaatcgcagagatcatcttccacttcggtgtacccagcgcataagccgcttcacgcaggctgtacggcaccagtttcagcatgttctcggtggtgcggataacaatcggcacctgcaacaacgccagggcaatcacgcccgcccagccggagaagtgctccatctgcgccaccacaatggtgtaaacaaacagaccaaccacaatcgacggcgcagagagcagaatgtcgttaatgaagcgaatcacttctgccagccaggatttacgaccatattccgccagataaatccccgccataatgcccagcggcgtaccgaataccgtggcccacaaaattaacagcccgctacccgccagagcgttcgccagaccaccaccttccgtattgggcggcggcgtcatttcagtgaacagcgccagcgacataccgtcgataccgcgagtgatggtggacattaaaatccagatcagccagaacaggccgaaggccatcgtcgccatcgagagcgtcagcgcaatacggtttttgaggcggcgacgcgcctgcattttgcggcgagattcagccagcgccgcagtggtttgcatttcaaccatagccattagcgtgccccctcattcttagccaggcgcataatcataaacttcgatgcggcgaggacgatgaaggtaatcacaaacaggatcaggcccagttccatcagtgcggcaacgtgcagaccggattccgcttccgcaaattcgttcgccagcgcagaggtgatactgttgcccggcatatacagcgaggcgctgtcgagctggtaggtgttaccgatgataaaggtcaccgccatggtttcaccgagcgcgcggcccagccccagcatgatgccgccgataacaccatttttggtgaacggaagaacgatacgccagataacttcccaggtggtgcagccaataccgtaggccgactctttcatcatcaccggggtttgttcgaacacatcacgcattaccgccgcaatgtacggaataatcatgatggcgaggatcacgcctgccgcgaggataccgataccaaatgcggggccagagaacagcgcgccaacaatcgggatattcgacatgatattgccgaccggctcctgaaagtaaacggcgaacagcggcgcaaagataaacaggccccacatgccgtaaacgatacttggaatggctgccagcagctcaatggcgatacccagcgggcgtttcagccagccaggcgcaagctcagtcaggaacagggcgataccgaaactcaccgggacggcgatcagcagcgcgataaacgaagtcaccaacgtaccgtagatcggcaccagcgccccgtagatatcgttcggtgcatcccactctttggtccataggaaagccagaccaaatttctgaatgctcggccaggaggagatgatcagagagacaataatgccacccaacatcaatagcacaatcagcgccgccagttttaccagcacgctgaaaattatgtcgccctttttacccggtgggttaaaagcaggcttggttgcagccataagttactcttcagttaaacgcgtttacaaagtcattttgtaatgccggatgcggcgtaaaacaccgtacccggcctggagttttattagtacagcggcttaccgctactgtctttaatattggtcttccacgcagcgcgaacctgttcaactacactatccggcaggctggcgtaatccaggtcgttcgcctgtttagccccggttttgtacgcccagtcgaagaatttcagcacttctgtgccttgttctggtttcttctgatctttgtggatcagaatgaacgtggtagaggtaataggccatgcatcttcgcctttctggttggtcagatcctgagcgaaggttttgctccagtctgcaccttttgctgcattagcgaagttttcttcggtcggactaaccggtttaccatcagcggagatcagtttggtgtacgccaggttgttctgcttcgcgtaagcatattcaacataaccaattgcacccggcagacgctgaacgaacgcggcgataccgtcgttacctttaccgcccagaccgatcggccattttacggtagagccagtaccaacgttgtttttccactcttcgttcactttcgccaggtagctggtgaagacgaaggaagtcccggagccatctgcgcggcgtactacagcaatgttttgtgaaggcagtttcagacccggattcagtttggcgatggcttcatcatcccacttcttgattttgcccaggtagatgtcgccgagggttttaccatccagcaccagttcgccagacttcagccctggaatgttaaccgccagcaccacgccgccaatcacggtcgggaactggaacagaccttcctgagccagtttttcgtcagacagcggcgcgtcagaggcaccaaaatcaacggtattagcgataatctgttttacgccaccggaagaaccgataccctggtagttaactttattaccggtttctttctggtaagtgtcagcccatttggcatacaccggcgcagggaaggttgcacctgcacctgtcaggcttgcttctgcaaacacagagaaagcactcatcgataaggtcgcggcgacaacagttgcgacggtggtacgcataactttcataatgtctcctgggaggattcataaagcattgtttgttggctacgagaagcaaaataggacaaacaggtgacagttatatgtaaggaatatgacagttttatgacagagagataaagtcttcagtctgatttaaataagcgttgatattcagtcaattacaaacattaataacgaagagatgacagaaaaattttcattctgtgacagagaaaaagtagccgaagatgacggtttgtcacatggagttggcaggatgtttgattaaaaacataacaggaagaaaaatgccccgcttacgcagggcatccatttattactcaaccgtaaccgattttgccaggttacgcggctggtcaacgtcggtgcctttgatcagcgcgacatggtaagccagcagctgcagcggaacggtgtagaagatcggtgcaatcacctcttccacatgcggcatctcgatgatgtgcatgttatcgctacttacaaaacccgcatcctgatcggcgaagacatacaactgaccgccacgcgcgcgaacttcttcaatgttgaatttcagtttttccagcaattcgttgttcggtgcaacaacaataaccggcatatcggcatcaattagcgccagcggaccgtgtttcagttcgccagcagcgtaggcttcagcgtgaatgtaagagatctctttcaacttcaatgcgccttccagcgcgattgggtactgatcgccacggcccaggaacagcgcgtgatgtttgtcagagaaatcttctgccagcgcttcaatgcgtttgtcctgagacagcatctgctcaatacggctcggcagcgcctgcagaccatgcacgatgtcatgttcaatggaggcatccagacctttcaggcgagacagcttcgccaccagcatcaacagcacagttaactgagtggtgaatgctttagtggatgccacgccgatttctgtacccgcgttggtcattagcgccagatcggattcgcgcaccagagaagaacccggaacgttacagattgccagtgaaccaaggtaacccagctctttcgacagacgcaggccagccagggtatccgcggtttcgccagactgtgacaaggtgatcatcaggctgttacgacgcacggcagatttgcgatagcggaattcagaggcgatttcgacgtcgcacggaatacctgctagcgattcaaaccagtagcgggaaaccataccggagttataagaagtaccacaggcgaggatctgaatatgctcaaccttcgacagcagttcgtcggcgttcggtcccagctcgcttaaatcaacctgaccgtggctgatgcgtccggtaagggtgtttttgatcgcgttcggctgttcgtagatctctttctgcatgtagtgacggtaaatgcctttatcgcccgcgtcatattgcagattggattcgatatcctgacgttttacttccgcgccagttttatcgaagatgtttaccgaacggcgagtgatttccgcaatatcgccctcttcaaggaagataaagcgacgggtcaccggcaacagcgccagctggtcagaagcgataaagttttcgcccatccccaggccaatcaccagcggactaccagaacgtgccgccagcagggtatccgggtgacgggagtccatgatcactgtaccgtacgcaccacgcagctgcgggatagcacgcagaacggcctcacgcagagtcccgccttgtttcagctcccagttcaccagatgggcaatcacttcggtgtcggtttcagaaacgaaggtatagccacgcgcttttagctcttcacgcagcggttcatggttttcgatgatgccgttatgcaccaccacaatgtgttcagaaacatgcggatgcgcattcacttctgaaggttcaccgtgggtcgcccagcgagtgtgagcaataccagtgccgccatgcagaggatgttcttccgctgcctgtgccagcatctggactttaccgaggcgacgcaggcgggtcatatgaccttctgcatcaacaacggccagaccggcagagtcatatccgcggtattccagacgacgtaaaccttcaagaaggatttctgctacatcacgttgcgcgatcgcgccaacaattccacacatagtttttgattccgatttatatcgttgtcggtcaacctgtatgcccgttttttcgggcgccccgagccttgtagagagtggggttatttttatagttactgcttgtgggagggagattatgttatctcctcatcccatgtgaccgggttagccggccagaatcactttttctttaccggacgacgccagccttctttctgagtctgcggcacacggctgatagctaatgcattttcgccgacattacgcgtcacagttgtacccgcagcaatggtcgcgcctttgcctactgttaccggggccaccagctgagtgtcggaaccaacaaacacatcgtcgccgataatggtcttaaatttattcgcaccatcgtagttgcaggtaatggttcccgcgccgatgttaacgttatcgccaatttccgcatcgcccaggtaagtcagatgaccagctttcgagcctttacccagacgcgcttttttcatctcaacgaagttaccgacgtgagcaccttccagcaactcagcaccaggacgcaaacgggcaaacgggccaatggtacaggccgctgccagattcgcatcttccacaacggtatacggactgatttcgcaatcatcgccaatcacgctgtttttaatcacgcaaccggtgccaattttcacgcgatgaccgagagtcacgttgccctcgatgataacgttagtatcaatttcaacatcgcgcccgtgagttagcgtaccacgcagatcaaaacgcgctggatcgcgcagcataacgcctgctaacagcagtttttcagcctgttcggactgataaacacgctccagacgggagagttgcaggcggttattcacgccttctacttcgcttaaacgttgcggatgaacggcgacgatttcacgcccttcctgatacgccagcgcaataatgtcggtgatgtagtattcgccctgagcattattgttggtcagcttcgccagccagcgtttcatatctgcgccgttggcaatcagaatgccggtgttgatctcctgaatctgacgctgctcgtcggtggcatctttgtgctcaacaatgccggtaactttgccgttttcacgggtgatacgtccataaccggtcggatcatccagtttcaccgtcagcagaccaatgccaccctgcggtttagcatcacgcagacgctggagtgtttcgacagagatcagcggcacgtcgccgtagagcattaaaatgtcttcatcatcggcaaagaaaggtgcggcctgctgcattgcatgacccgtacccagctgctctgcctgaagcacccagttaaggttgtcgtctttcagcgcctgttttagcagatcgccgccgtgaccgtacaccaggtgaacgtgcgctgcgcctaattcattcgcagcatcaatgacatgctgaaccatcgctttcccggcaagggtatgcagcactttcggaagatcggaatacatgcgcgtgcctttgcctgcggcaaggatcactacgctcatagcattattcaacatacgcgtcctgactgtaatttgagaacgaatttaaaccgcttcaccttgaaaaaactacatttttttcatcgtgaaatggacagaggataaattgttcaataacggattatccccgctgacgaaagcgccattttcgaccatcgtcacgccttttgtctgcagaaaattaaggcagtaccttaatttaagcgtcaggtggatgtttttgctcttatttcgatcaatgaataaacaggaaaacaggggggttttatatcagcaggatctatgtgaacgctattcaggacgggtcacacgcgcaaaaaaaagccagcctgtttccagactggcttttgtgcttttcaagccggtgttacatcgcttttttggtcaactcgataacgcgcagctgcgcgatcgctttggccagttccgcagacgcctgagcgtaatctacgtcgccgtgagagctgctaatgtgctcttcagccttacgtttcgcttccatggctcgcgcttcgtcgagatcctggccgcgaattgcggtgtcggccagaacggtcacgttgccaggctgcacttcaagaatgccgccagacagatagataaactcttcgtgaccgtgctgtttcacgatgcgaatcataccaggcttaatggcggtgagcagcggtgcgtggccagggtagatccccagttcaccttcgctacccgttacctggattttctcgaccagaccagagaacatttgttgctctgcgctgacgacgtccaggtggtaagtcattgccatatcaccctccgattaaggcgttaaagttttttggctttttccacagcttcttcgatggaaccgaccatgtagaacgcctgctccggcaggtgatcgtattcgccttccatgatgcctttaaagccacggatggtgtctttcagggagacgtatttacccggagaaccggtgaatacttctgccacgaagaacggctgggacaggaagcgctggatcttacgagcacgcgctaccaccagtttgtcttcttcagacagttcatccatacccaggatggcgatgatgtctttcagttcctgataacgttgcaggatggactgaacgccacgcgcggtgtcgtagtgttcctgaccaaccaccagcgggtccagctgacggctggtggagtccagcgggtcaacggccgggtagatacccagagacgcgatctgacggctcagtaccacggttgcgtcaaggtgcgcaaaggtggttgccggagacgggtcagtcaagtcatccgcaggtacgtatactgcctgtacggaggtgatagaaccagttttggtggaggtgatacgttcctgcagaacgcccatctcttccgccagggtcggctgataacctaccgctgaaggcatacggcccagcagtgcggatacttccgtaccggccagggtgtaacgatagatgttgtcaacgaacagcagaacgtcacgaccttcgtcacggaatttctcagccatggtcagaccggtcagagcaacgcgcagacggtttcccggcggctcgttcatctggccatacaccagggatactttgtcgataacgttggagtcggtcatttcgtggtagaagtcgttaccctcacgagtacgttcacctacgcccgcaaacacagagtaaccggagtgctcgatcgcgatgttacgaatgagctccatcatgtttacggttttacctacacccgcaccaccgaacagaccaactttaccgcccttagcgaacggacacatcaggtcgataactttgataccggtttccagcagttcctgagagtttgacagctcttcgtaggaaggtgctgcgcggtgaatcgcccaacgctcttcttcaccgatctcgcctttcatgtcgaccggttcacccagtacgttcatgatacggcccagagtcgctttacctaccgggacttcaatcgggtgttcgaggtcttttacatccagaccgcgacgcagaccgtcggaggaacccattgcgatggtacgtacgataccgccgccgagctgctgctgaacttccagcaccagacgctcattaccattttgcacctcaagagcatcgtacacgcgcggtacggcatcctgagggaattcgacgtcaactacggcgccgattacctggacaatctttccagtagccatcttaaatcctctacgaaataacctgtttaaaccgcggcggcccccgagacgatctcggtgagttcctgagtaatgctggcctgacgagctttgttgtataccaactgcagctctttaatcaggctgccgccattgtcggtcgcggctttcatcgccaccatacgggcggcctgctcgctggccaggttttcaaccacgccctgataaacctgagattcgacataacgacgcagcagggtatccagcaacgccttcggatcgggttcgtacaggtaatcccaggatttatgtttcagatcatcatcatctgatgccggtaacggcagcagctggctgatggtcggaacctgagacatggtgttaataaatttgttgctgacaatgtaaagcttgtccagacggccttcgtcgtaggcctgcaacatcacttttaccggaccgatcagttcggacagggaagggttatcccccatgccggtgacctgggcaacaacattgccgcccacggagttgaagaacgacacgcctttcgagccgatcattgcgaggtcgcattgaacgcctttgtcggtccaggtcttcatttccgccagcagttttttgaacaggttaatgttcaaaccaccgcacaaaccacggtcggtcgacaccaccaggtagcccacgcgtttaacgtcgcggtcttccaggtaagggtgcttatattccagattaccgtgtgcaaggtgaccaatcactttgcgcatggtttctgcataaggacggctggccgccatgcgatcctgcgatttacgcattttggaagcggcgaccatctccatcgctttagtgatcttttgcgtgttctggacgcttgcgatcttactacgtatctcttttgcgccggccatgagcttctcctcaatgccttgcggcctgccctaaggcaagccgccagacgttaccaggattgggttgctttgaaggaatcgaggatgcctttcagcttgccttcgatttcgtcgttgtagccaccggtctggttgatctcttgcatcaacggagcgtgatcacggtcgacgtaagccagcagagcggcttcgaagctgccaattttcgacagttcaacatccgccaggtaaccacgttctgctgcgaacagaaccagagactgctgcgcaacggacatcggcgcatactgtttctgtttcagcagttcggtcactttctgaccgtggtcaagctgcttacgtgttgcatcgtcaaggtcggatgcaaactgagagaacgctgccagttcacgatactgtgccagagcggtacggataccaccggacagttttttcatgatcttggtctgtgctgcaccaccaacacgggatacggaaatacccgggttaaccgcaggacgaataccggcgttgaacaggttggtttccaggaagatctgaccatcggtaatggagattacgttggtcggaacgaacgcagaaacgtcacccgcctgagtttcgataatcggcagtgcggtcagagaaccggttttccctttcacttcacctttggtgaaggcttcaacgtattcggcgttaacacgtgcagcacgctccagcagacgagagtggaggtagaaaacgtcgcccgggaatgcttcacgtcctggcggacgacggagcagcagggagatctgacggtaagcaacagcctgtttagacaggtcatcgtaaatgatcagcgcatcttcaccgcggtcacggaagtattcgcccattgcgcaaccggcatacggtgccaggtattgcagtgcagcggattcagacgcggttgctaccacaacgatggtgttagccagtgcgccgtgctcttccagtttacgtaccacgttagaaatggtggacgctttctggccgatagcgacatagatacatttgataccggaatcgcgctggttgatgatggcatcgatagccagtgcggttttacctgtctgacggtcaccgatgatcaattcacgctgaccacgaccgattgggatcatggagtcaacggctttataaccggtctgtaccggctgatctacggactgacgttcgataacgcccggagcgattgcttctacagcagagaagccgtcgtgatccagcggacctttaccgtcgattggtgcacccagagtgttaaccacacggcccagcaggccacggccaaccggaacttccaggatacggccagtacacttaactttcatgccttcggcaaggtcagcgtacggacccataacaaccgcacctacagagtcgcgctcgaggttcagtgcgatagcgtaacggttacccggcagggagatcatttcaccctgcatacaatcggccaggccgtgaatgcggataacaccgtcacttacagaaacaatagtaccttcgttgtgagcttcactcacaacattgaactgagcaatgcgctgcttgatcagttcgctgatttcggtggaattcagttgcatgctccagtccccttaagactgcaagacgtctgcaaggcgctcaagacgaccgcgtacgctgccatcaatgaccatatcacccgctcggatgataacgcctgccattacagacttatcgattttgcaattcagcttaactttgcgtgacagacgtttttccatcgcagcagaaattttcgcgagctgttgttcactcagtgcggcagcggaaatgacgtctacctcagcggtagcctcactcacggcacgcaggtgaataaactgctccagaacatccgggagcgcgttaagacgaccattttcagccataacccgaatcaggttctgaccgttttcgtccagttgctcaccacaaactgcgataaacgactcggcgagcgtttctggcgcaagcgcgccagagagaagctctgccatttgttcgtttttggttacctcggcggcaaacgccagcatgtcctgccagcgttctacactttggtgttcgacggcaaagtcaaaagctgctttggcgtaggggcgagctaccgtaataaattcagacatcagcccctccctccttacagttcagcgacaagtttatccacgatgtcgctgttagcagcttcatccacggaacgttcgatgatcttctcggcgccagcaacagccaggatagcaacttgcttacgcagctcttcacgggcacgtttacgctcggcttcaatttccgcctgcgcctgggccacgattttagtacgttcctgttctgcctcagctttcgcttcgtccagaatctgcgagcggcgtttgttcgcctgctcgatgattacctgggcttccgctttcgcttttttcagctggtcggtcgcgctggcctttgcaaggtcaaggtccttatgtgctcgttctgcggaagcaaggccgtcagcaatttctttttgacgtttttcgatggctgccattaatggcggccatacgtacttcatgcagaacagaacgaacaggacaaacgcgatggcctggccgaggattgttgcgttaagattcacagcacaatgcctctatttagttaacgttctgatattgctctttaaataaaagcaacgcttactacgcgacagcgaacatcacgtacagacccagacctacagcgatcatcgggatagcatccaccagacccataacgataaagaactgagtacgcagcagaggaatcagatcaggttgacgcgctgcgccttccaggaatttacccccgaggatgccgataccgatcgcagcaccgattgccgccagacccatcatcacagcggcagccatgtacagcagatccatattcaggttttccatgacagtctccagtttgtttcagttaaaacgtagtagtgttggtaaattaatgttcttcagacgccatcgacagatagacgatcgtcagaaccatgaagatgaaggcttgcagcgtaatgatcaggatgtggaaaatggcccacggcacattcaggatccactgtgaccaccacggcaacagaccagcaatcagaatgaaaatcagctcaccggcatacatgttaccgaacagtcgcaaaccgagtgaaactggtttggacagcaggcttaccccttcaaggattaagttgacaggaatgaacgcccagtgattgaacggctgcagcgtcaactctttcgtgaagccgccgatgcctttcattttgatgctgtagaacagaatcaggataaatacgcccagtgccatagacagcgttacgttcacgtccgcagacggaaccacacgcagtgcaggcagacccagtacatgttcagcaatgtacggcagcaggtcgataggcagtaaatccatcaggttcatcaggaatacccagacgaagatcgtcagggccagcggagcaatcagcttgcttttgccatggtacatgtctttcacgctaccattaacaaagccgatcaccagctcaatcgcggtctgaaacttacctggcacaccgctggtcgcctttttggctacgctacggaataaaaccaggaacaacagacccagcaccaccgagaagaacatggagtcaatattgattgtccagaaggtggctggggggttttgtggatccaccagcgagaatgtacgcaggtccagctgaaggttattcaggtggtgtcctatgtaatcctgcggcgtcatattttctgaagccatgatgccttttaccctttgttgttaattacagccggtgccagtatctgaaccaccagcaccaaaacccacgtaacgatcagcggcaagaataccgcctttaaaaccgccaacgccaccaccagtaacaccaacatcgccagaactttgaaagcttcgccaaatgcgaatgtccaggccacccggcctttcgctggtgtatgcgcctggtgacgccaggcaaatatcataaacaaaacgttaggcagaaagactgccaggcccccgcttattgcagagacgccccagaaggggtctttgaggctgaacagcaatccacttgctatcaccaccagtaactgaacgagcagaagcttccgagcaacgtttcgactcacgagcgacacagacatcacgtttttcactcctgctcccttcgaggtatgccgcgtgtcgtataaaactttctttaaggcttagagtcaagcatcaaaaagcggtcaaattatacggtgcgcccccgtgatttcaaacaataagtagccaaaaggtgaataaatgtttaaatatttttccagtgcatacaattgcgacttttctgctaaccctgttcgatcatgaaaaactgtaaataacgcgtaaacactggtgataaagcgtgcttcagatcacatattgcgcatgttcgcgcacagcatatttatttacttggcaaatgatgcctttgcaagtttatgatatttcagtctaaaaacagatactgttttaataaatgacatttacacaacaaaaaccacccattgacatttttaataatgttttaacagccaatgatggttcttagcgccgatttttagcagactgatattttcactaatgacttattttctgcttaccaaaaaaagccacgttatcttgttgatgcaaaagagtgaacgtggcgttaaatgtaaccagttatatcagtagaaaacctggttgttgttaacagtctaaccggtcaattttttatgatttttttgataaaaattaaattttatttgctttaatcaccaccagatgacgttcgccatccagggctggaacctgaagtttaaccactgattcgacctgatattcttcgggcaacaaagcgatttcatcttccggcatttgccctttcagcgcgtagaaacggccttgctcaccaggaagatggtggcaccagctcaccatatcgttcagagaggcaaaagcgcggctaattacgccatcaaatggcggctctgaaggaaactcttctaccctgctctgtactggttcaatattctccagtttaagctcatgttgcacctgacgaaggaaacgcacgcgtttaccaaggctatccaacagagtgaaatgggcttcaggacgcacgatagagagtggaatgcctggcagtcctggtccggtgccgacatcgataaaccgttcaccttgcagatacggtgccaccacaatgctatcgagaatatggcgtaccagcatctcattaggatcgcggaccgaagtcaggttgtacgctttgttccatttatgcagcatattcacgtaggcaataagctggtttttctggtgatcggtaagcgaaatacctgcgtctttcagcagtaaggagagtttgttgagcacggtgattacctgttcttgatgcgttgcctggtaagcgggtgcttaccaggcatttttaatgcgttatgcgctacgacgcagcataccctgttttttcagccacaccagcagaatggagatggccgcaggcgtgacgccagaaatacgcgaagcttggccgatagaggctggtttgtgatcgttaagtttggcgatcacttcgttagaaagaccggatacctggcggtaatccagtgtcgcgggtagcagggtgttctcgttacgcagctgcttttcgatctcatcttgctggcgcgcgatataaccttcgtatttaacctgaatctcaacctgttccgccgcctgttcgtctgtcaacgcaggggcaaacggcgtcagcgtggttaatttttcataagtcatttccggacgacgcagcagatcttcaccactggcttcacgggaaagcggcgcagtcaggtgagcattcacttcggctgcagcttccgccgacggggttacccaggtcgatttcagacgctgacgctcacgctcgatattctcaagtttctcgttaaagcgcgcccaacgttcgtcatccaccaggcccagttcacgaccgatttcagtcaaacgcagatccgcattatcttcgcgtagcatcagacgatattctgcgcgcgaagtaaacatacgatacggttctttggttcctaaagtgcacaggtcatcaactagtacgccgagatacgcctgagaacgtgccggagcccaaccttctttgtcagcagacagacgggcagcgttaagaccggccagcaaaccttgcgcagcggcttcttcgtaaccggtagtgccgttaatctgaccagcaaagaacagcccctggataaacttgctctccagcgtcggtttcaggtcgcgaggatcgaagaagtcatactcaatggcataacccggacgcacgatcttcgcgttttccatcccctgcatagagcggacgatttgcatctgcacatcgaacggcaggctggtggagataccgttcggataaatttcattagaggtcagtccttccggttcaaggaagatctgatgctgatttctgtcggcgaagcgcatgactttgtcttcgatcgacgggcagtagcgtgggccgacaccttcgatcacccctgcgtacattgggctacgatcgaggttactgcggatcacatcatgggttttctcgttggtatgagtgatataacacggcacctgctggggatgctgggacgcattgcccataaacgagaataccggcattgggttatcgccatgctgttgcgccagtacgctaaagtcgatggttcgagcatcaatacgcggtggtgtcccggttttcagacgaccaacgcgcagcggcagttcacgcaaacggcgagaaagcggaatggacggcggatcaccagcacggccaccgctgtaattatccagaccgatatgaattttaccgtcgaggaacgtcccaacggtgagcacgacggctttggcacggaacttcagtcccatttgggtaacagcaccgaccacgcgatcgttttcgacaataagatcttcaaccgcctgctggaagatcatcaggttcggttggttctccagcgccgtacgtaccgcctgacggtagagcacacgatccgcctgagctcgggtagcgcgaaccgccggtcctttgcttgcgtttagtatcctaaactggatacccgcctgatcgatcgctttcgccatcagaccgccgagtgcatccacttcttttaccagatgtcccttcccaataccgccgatcgccgggttgcagctcatctgccccagagtgtcgatattgtgtgtcaaaagcagagtctgttgacccatacgcgccgcggccatcgcggcctcggtgcctgcatgacccccgccaatgatgatgacgtcaaaaggatccggataaaacatggtgattgcctcgcataacgcggtatgaaaatggattgaagcccgggccgtggattctactcaactttgtcggcttgagaaagacctgggatcctgggtattaaaaagaagatctatttatttagagatctgttctattgtgatctcttattaggatcgcactgccctgtggataacaaggatccggcttttaagatcaacaacctggaaaggatcattaactgtgaatgatcggtgatcctggaccgtataagctgggatcagaatgaggggttatacacaactcaaaaactgaacaacagttgttctttggataactaccggttgatccaagcttcctgacagagttatccacagtagatcgcacgatctgtatacttatttgagtaaattaacccacgatcccagccattcttctgccggatcttccggaatgtcgtgatcaagaatgttgatcttcagtgtttcgcctgtctgttttgcaccggaatttttgagttctgcctcgagtttatcgatagccccacaaaaggtgtcatattcacgactgccaataccgattgcgccaaagcggactgcagaaagatcgggcttctgttcctgcaatgcttcatagaaaggagaaaggttgtccggaatatctccggcaccgtgggtggagctgataaccagccagatccctgaggcaggtaaatcttctaacagcggaccgtgcagcgtttcggtggtaaaacccgcctcttccagcttttcagccaggtgttctgctacatattcggcaccgccgagggtgctgccgctgataagagtgatatctgccataaaccgccacctttattaagagtggcgtattgtacgctgtgaacgcgttgggatctacctgtggaaaagtatgggattaaaaaagccgatcagggcttgatggtacgcatgatcgggttttgcaggacgatcaatgtctcggtggactgaatttcatcaattgtttggatcttgttgataagtacatgctggagagcgtcgatcgaacggcacatcacttttataaagatgctgtagtggccggttgtgtaataggcttcagtgacttcatcaaggctttccagctttgccagcgcggaagggtagtctttggcgctctttaatataatgccgataaagcagcctacgtcataaccgagctgcttcgggctgacatcaatacgcgccccggtaatgatccccgcctgcttcattttctctactcgaacgtgaatcgtccccggactgacgccaaattgtttcgccagttcggcgtaagcggtgcgcgcattgcccattaatgcttccaggatgccacggtccagattgtcgatcagataattttccataggattttcttatgcggattgatgattcattctattttagccttcttttttaatgaatcaaaagtgagttaggctttttattgaatgattattgcatgtgtgtcggtttttgttgcttaatcataagcaacaggacgcaggagtataaaaaatgaaaaccgcttacattgccaaacaacgtcaaattagcttcgtgaaatctcacttttctcgtcaactggaagaacgtctggggctgatcgaagtccaggcgccgattcttagccgtgtgggggatggcacgcaggataacttgtcgggctgtgaaaaagcggtgcaggtaaaagtgaaagctctgcctgatgcccagttcgaagtggttcattcactggcgaagtggaaacgtcagaccttagggcaacacgacttcagcgcgggcgaagggctgtacacgcacatgaaagcccttcgccccgatgaagaccgtctttctccgttgcactcggtctatgttgaccagtgggactgggaacgcgtaatgggcgacggtgagcgtcaattctcgactctgaaaagcacggtagaggcgatctgggcgggaattaaagcaaccgaagctgcggttagcgaagagtttggcctggcaccgttcctgccggatcagatccacttcgtacacagccaggagttactgtctcgttatccggatcttgatgccaaagggcgtgagcgggcgatagcgaaagatcttggcgcggtattccttgtcgggattggcggcaagctgagcgatggtcatcgccacgacgtgcgcgcaccggattatgatgactggagcaccccgtcagagctgggccatgcgggtctgaacggcgatattctggtgtggaacccggtactggaagatgcgtttgagctttcctccatggggatccgtgtagatgccgacacgctgaagcatcaactggcgctgaccggtgacgaagatcgcctggagctggagtggcatcaggcgctgctgcgcggtgaaatgccgcagaccatcggcggcggtatcggccagtctcgtttgactatgctgctgctgcaactgccgcatatcggccaggttcagtgtggagtatggccagctgctgttcgcgagagcgtcccttctctgctgtaataatttatcgccgccagcgtctgagcaggcggcttcgcatcccggtatcaaagcgccagatatgatcgaaaatgcgcatgatgccgggtttgccgtgtgccgacatcgccacggcatgaaagcgatgctgatgtacccgctgcagctctttcactttactcgtcacgtcgtcaggcaaccgctgagcgataaaatcagaaatcaccaccgcatcggcatcaaaccattccctgctttgcaagcgttccataatggcgcgaaaacaactggcaagatcggtgccgccacgaaactgctggcttaaaaaacggattgcttgttcgatgccttgtgggcctgaaagctcataacggacgatctcggtggaaaatagcataatatagcagcgccggttttctgcgagagcaatgcgcatcaaggccaggcagaacgctttcgcacactgttcattaaagccgcccattgagccggaagtatccacacagacaataaacggcccgcgcggctgttcatcgtaatctttatgtaccaccggacgttcgatcactttttcacgccacgactcaccgtgcaggcgataggtgagcaactgtttttccaccagccgacggtaaaactcatactccagttccgttatccctagtgtcgccagttctggcggcaggagacgtaaaatatcatcgctttgttgcagaccatcaacctgctcaggaaccgtcgccggttcgcgcaccatggtgcggaaggtttccatctgcgcatcgttgcgcggtattgatttggcttcccgagaacgccccagctgctctgccaggcgtttcagttccggctgttcgttaagaaattcaccgtatttcacaatcaactgatagtcgccacgtttaagctgaccggcgctcatatcccacagacgaccagctgcagtattgttatctgcgagaatcggttcaagttgtccgctcagcgtcatgcgttcctgaacttcactcaacagttgttcgcgttcttcttctaatagctgttgatttaacgtcgttgcttgcacgatcagacttaaacgccaacgctggagaaaaagcgtgtgtaacgctgaagtgatcgtgctgttagcatcaaccaactgtcgggcttgttctgcccatggagaattcagacgatgcagtaagtccaggatctgtggtagctgcacaataaactgtggcgtggagaggagctggctttgctgatagcacatcacctcttcggtgagttccggcgggactcgggcatctttcagccgactgcgcagcgcttcacgccagcggggaacatcatcagtgattgccgccttcaggcgtgggaatttttcaaagaagaccgccagctgcggtgaggccagcagtgcgatgatcatctcttcgatcaatccctcttcgctgacggccagcatcacattaagcgtatccagcgttagcattgttgtgcctggcgaatctgtgcaccgacatcctgtaggctggcttcaatgcgacctaaccagtcgccagggataaacagacatttttgctgttcgctgaataaagcgtgttgcttgcgccagtcgctttcaagctcttccagttgttgttttatttcaccaggcagaccttcagccgatgaaccgggaagtgccagcgtactgccttgtaaacttacatcgcgaacgacaagatgttgggcgctatcaacttccagattcagtttctgggcaaagccgataccgttcagtttaccgcgaatttcaccacctttgctcagccactgttccagcgcgctacgctcaaaggagatatgaaccacttccatatcatgcagttttaacggtttttgcagcagtagagtcagagtggaagcagtaacgttaacaggaagttgatactgctgacgacggctgaaaatgccgcccagacgaattaccgttaaggctgttttatcgctttgttgctgctggagttgcaggtgacgttgcacaatcgcgccaaggcgagtcaacatcccttgctgttgccaggcgtgaccggtcatcaatacatcaatttgttgttgtatcaaattcaggctttgcgcgtcataccacaggcaatctttcagcaaaatgagatctaccggggcaacagcactgcgaccgctaaaaaaggcgctggcctgcaataatcggatcgcttttttccagcgacgatccgagacataaggcgcatccggtaatttatccagttgctggcgcagcataaaaatcagctcaaatacatgatcgggcagcgtaatttcaccaatctctttctgccagcgttcatattcttcatctgtgacctgcaaggcatcaggaaccggattgtcgttttcatcctgttgactggtcagcatggagcggaaattcgctttatcctgcactttatctaaccacagacgaatcagcatgcggtcatataacgcttccagactgctgtctgcttccggcagctcgttggaggccgccaccagcagacgcatcgggattttttctacgtgtgcaccgttgcggaactggcgctcgttaatggcggtgagcaaggtattaagaattgccgggcccgctttccagatctcatccagaaagacaatttctgcttccggcaggtaaccgctggttaaacgttcatagcgcccttcatcttttagcgcctgaatagaaaggggaccaaaaacttcttccggcgtggagaagcgggtcatcagatattcaaacgcgcgggcattctgaaaggcgaattttaagcgccgggcgatcaaacttttggcaatacctggcgggccaaggaggaacacactttcaccacttaatgccgctaataaacacaagcggatggcgtggctacgttcataaagccccttttccaacgaactgctcaggcgggaaattcttttcgctaataaatgagggtgagccataatgaagtggcgtcctttcgtcaaaagttctgcgtaaattgcgagtatagacgtttcttgctggtggctaaaatagtctcaaagggggggtatttttctttgagccaggttaatgtggccgcatttaggagtacgattttgccgttaatcgtgcatactgtgcgcttttttgtgggccaagggactaagcacacatttcatatttcaacgaaagactagtctatgagcactgataataagcaatcattgcccgcgattaccctcgcggcgattggagttgtctacggcgatattggtaccagcccgttatatacacttcgtgaatgtttgtccggccagtttggttttggcgttgaacgcgatgccgtgtttggctttttatcgctgatcttctggctgctaatctttgtggtttccattaaatatctcaccttcgtgatgcgggcagataacgccggtgagggggggatcctgacgttgatgtcgcttgccgggcgtaatacgtcggcgcgaaccacatcaatgctggtgattatggggctaatcggcggcagctttttctatggtgaagtcgtcataacacccgctatttcggtgatgtcagccattgaaggtctggaaatcgtcgccccgcagctggatacctggatagttcccctctcaattatcgttctcactttattatttatgattcaaaaacatggcacggctatggtcggtaagctgtttgcgccgatcatgctgacctggtttttgattctggcaggactggggttacgtagcattattgctaacccggaagtgctgcatgcgctgaatccaatgtgggcggtgcatttcttccttgaatacaaaacggtttcttttattgcattaggggcagtggtgttgtcgattacgggggtcgaggcgctgtatgctgatatggggcactttggtaagttccctattcgcctggcgtggttcaccgtcgtattaccttccttgacccttaattacttcggtcagggagcgctgttgttaaagaacccggaagcgattaagaacccgttcttcctgttggcaccggactgggcgctgatcccgctgctgatcatcgccgcactggcgacggtaattgcctcgcaggcggttatctctggcgtcttctcattgacgcgtcaggcggtacgtctgggatatttgtcgccgatgcgcattattcacacctccgaaatggagtcagggcaaatctatattccgtttgtgaactggatgctctatgtcgcggtcgtgattgtgattgtcagctttgagcactccagcaacctggcggcggcgtacgggattgcggtgaccggaaccatggtgctgacgtctattctctcgactaccgtggcacgtcagaactggcactggaataagtattttgttgcgctgatcctgattgctttcctttgtgtcgatattccattgttcaccgctaacctcgataaactgctctccggcggctggttgccattgagcctcggtactgtgatgtttatcgtgatgaccacctggaagagcgagcgtttccgcttgctgcggcggatgcatgaacatggtaactctctggaagcgatgattgcttcgctggagaaatcaccgcctgttcgcgtgcccgggaccgcggtgtatatgtcgcgtgcaatcaacgtcattccctttgcgctgatgcataaccttaaacataacaaggtattgcatgagcgggtgattctgttaactctgcgcaccgaagacgctccatatgtccataacgtccgtcgggtacagattgaacaactgtcgcccactttctggcgcgtggtggcaagttatggttggcgagaaacgccaaacgtagaagaagttttccaccgctgcggtctggaaggattaagttgccggatgatggaaacctccttctttatgtcgcatgagtcgttgatcctcggcaaacgcccgtggtatttgcgtctgcgcggcaagctgtacttgctgctgcaacgtaatgcgctgcgtgcaccagatcaatttgaaatcccgccaaacagggttatcgaactgggtactcaggtcgaaatctaacgccagacgcctcctttcttcataagggggcgtttttgttttcatggttaatcaccatgtaaaacgtttcgaggttgatcacatttccgtaacgtcacgatggttttcccaactcagtcaggattaaactgtgggtcagcgaaacgtttcgctgatggagaaaaaaatgaaaaaaggcaccgttcttaattctgatatttcatcggtgatctcccgtctgggacataccgatacgctggtggtgtgtgatgctggtttacccatccccaaaagtacaacgcgtatcgatatggcattaacccagggtgtaccttcttttatgcaggtgctgggcgtcgtcacaaatgaaatgcaggtcgaggcggccattatcgcggaagagatcaaacaccataatccgcaactccacgaaacgttgctcactcaccttgagcagctgcaaaaacaccagggaaataccattgaaattcgttacaccacgcatgaacaattcaaacaacaaaccgcagaaagtcaggcggtaattcgcagcggagaatgttctccgtatgcgaatatcattctctgtgctggcgtgacgttctgaggccgtcatggaagcattacttcagcttaaaggcatcgataaagccttcccgggcgtaaaagccctctcgggcgcagcgttaaatgtctatccgggccgcgtgatggcgctggtgggcgaaaacggcgcgggtaaatccaccatgatgaaagtgcttactggcatctatactcgcgatgccggtacgcttttatggctggggaaagaaacgacatttaccgggccaaaatcttcccaggaagccgggattgggattatccatcaggaactgaacctgatcccgcagttgaccattgccgaaaacattttcctcggtcgtgagtttgttaatcgctttggcaaaattgactggaaaaccatgtatgccgaagcggataaattgctggctaaacttaacctgcgctttaaaagcgacaagctggtgggcgatctttccatcggtgaccagcaaatggttgaaatcgccaaagtgctgagctttgagtcgaaagtcatcattatggatgaaccgaccgatgcgctgaccgataccgaaaccgaatccctgttccgcgtcatccgcgagctgaaatcgcaaggccgcggtattgtctatatctcccaccgcatgaaagaaatcttcgagatttgcgatgacgttaccgtttttcgtgatgggcaatttattgctgagcgcgaagtggcatcactgaccgaagattcgctgattgagatgatggtgggtcgcaagctggaagatcaatatccgcacctggacaaagcgccgggagatatccgcctgaaagtcgataatctctgcggacctggcgttaacgatgtctcttttactttacgcaaaggcgaaattcttggcgtctctggtttgatgggcgcaggtcgtaccgaactgatgaaagtgctctacggcgcactaccgcgcaccagcggttacgtcaccctggatgggcatgaagtcgttacccgttcaccgcaggatggcctggcaaacggcattgtgtatatctccgaagaccgtaaacgtgacggtttagtgttgggcatgtcagtaaaagagaacatgtcgctgacagcgctgcgctacttcagccgcgctggcggcagtttgaagcatgccgatgaacagcaggctgtgagtgatttcattcgtctgtttaatgtgaaaactccgtcgatggaacaggcaattggtctgctttccggtggcaatcagcaaaaagtggcgattgcccgcggtctgatgacacgccccaaagtgttgatccttgatgaacctacccgtggcgtagatgtcggcgcgaaaaaagagatctatcaactgattaaccagttcaaagccgatggcttgagcatcattctggtgtcatcggagatgccagaagtattaggcatgagcgatcgcatcatcgtcatgcatgaagggcatctcagcggggaatttactcgtgagcaggccacccaggaagtgttaatggctgccgctgtgggcaagcttaatcgcgtgaatcaggagtaaaaaaatgacaacccagactgtctctggtcgccgttatttcacgaaagcgtggctgatggagcagaaatcgcttatcgctctgctggtgctgatcgcgattgtctcgacgttaagcccgaactttttcaccatcaataacttattcaatattctccagcaaacctcagtgaacgccattatggcggtcgggatgacgctggtgatcctgacgtcgggcatcgacttatcggtaggttctctgttggcgctgaccggcgcagttgctgcatctatcgtcggcattgaagtcaatgcgctggtggctgtcgctgctgctctcgcgttaggtgccgcaattggtgcggtaaccggggtgattgtagcgaaaggtcgcgtccaggcgtttatcgctacgctggttatgatgcttttactgcgcggcgtgaccatggtttataccaacggtagcccagtgaataccggctttactgagaacgccgatctgtttggctggtttggtattggtcgtccgctgggcgtaccgacgccagtctggatcatggggattgtcttcctcgcggcctggtacatgctgcatcacacgcgtctggggcgttacatctacgcgctgggcggcaacgaagcggcaacgcgtctttctggtatcaacgtcaataaaatcaaaatcatcgtctattctctttgtggtctgctggcatcgctggccgggatcattgaagtggcgcgtctctcctccgcacaacccacggcggggactggctatgagctggatgctattgctgcggtggttctgggcggtacgagtctggcgggcggaaaaggtcgcattgttgggacgttgatcggcgcattaattcttggcttccttaataatggattgaatttgttaggtgtttcctcctattaccagatgatcgtcaaagcggtggtgattttgctggcggtgctggtagacaacaaaaagcagtaataacgactacaggacatcttgaatatgaacatgaaaaaactggctaccctggtttccgctgttgcgctaagcgccaccgtcagtgcgaatgcgatggcaaaagacaccatcgcgctggtggtctccacgcttaacaacccgttctttgtatcgctgaaagatggcgcgcagaaagaggcggataaacttggctataacctggtggtgctggactcccagaacaacccggcgaaagagctggcgaacgtgcaggacttaaccgttcgcggcacaaaaattctgctgattaacccgaccgactccgacgcagtgggtaatgctgtgaagatggctaaccaggcgaacatcccggttatcactcttgaccgccaggcaacgaaaggtgaagtggtgagccacattgcttctgataacgtactgggcggcaaaatcgctggtgattacatcgcgaagaaagcgggtgaaggtgccaaagttatcgagctgcaaggcattgctggtacatccgcagcccgtgaacgtggcgaaggcttccagcaggccgttgctgctcacaagtttaatgttcttgccagccagccagcagattttgatcgcattaaaggtttgaacgtaatgcagaacctgttgaccgctcatccggatgttcaggctgtattcgcgcagaatgatgaaatggcgctgggcgcgctgcgcgcactgcaaactgccggtaaatcggatgtgatggtcgtcggatttgacggtacaccggatggcgaaaaagcggtgaatgatggcaaactagcagcgactatcgctcagctacccgatcagattggcgcgaaaggcgtcgaaaccgcagataaagtgctgaaaggcgagaaagttcaggctaagtatccggttgatctgaaactggttgttaagcagtagttttaatcaggttgtatgacctgatggtgacataaatacgtcatcgacagatgaacgtgtaatataaagaaaagcagggcacgcgccaccctaacacggtggcgcattttatggacatcccgaatatgcaaaacgcaggcagcctcgttgttcttggcagcattaatgctgaccacattcttaatcttcaatcttttcctactccaggcgaaaccgtaaccggtaaccactatcaggttgcatttggcggcaaaggcgcgaatcaggctgtggctgctgggcgtagcggtgcgaatatcgcgtttattgcctgtacgggtgatgacagcattggtgagagcgttcgccagcagctcgccactgataacattgatattactccggtcagcgtgatcaaaggcgaatcaacaggtgtggcgctgatttttgttaatggcgaaggtgagaatgtcatcggtattcatgccggcgctaatgctgccctttccccggcgctggtggaagcgcaacgtgagcgtattgccaacgcgtcagcattattaatgcagctggaatcaccactcgaaagtgtgatggcagcggcgaaaatcgcccatcaaaataagactatcgttgcgcttaacccggctccggctcgcgaacttcctgacgaactgctggcgctggtggacattattacgccaaacgaaacggaagcagaaaagctcaccggtattcgtgttgaaaatgatgaagatgcagcgaaggcggcgcaggtactgcatgaaaaaggtatccgtactgtactgattactttaggaagtcgtggtgtatgggctagcgtgaatggtgaaggtcagcgcgttcctggattccgggtgcaggctgtcgataccattgctgccggagatacctttaacggtgcgttaatcacggcattgctggaagaaaaaccattgccagaggcgattcgttttgcccatgctgccgctgcgattgccgtaacacgtaaaggcgcacaaccttccgtaccgtggcgtgaagagatcgacgcatttttagacaggcagaggtgacgcttggctacaatgaaagatgttgcccgcctggcgggcgtttctacctcaacagtttctcacgttatcaataaagatcgcttcgtcagtgaagcgattaccgccaaagttgaagcggcgattaaagaactcaattacgcgccatcagctctggcgcgtagcctcaaactcaatcaaacacataccattggcatgttgatcactgccagtaccaatcctttctattcagaactggtgcgtggcgttgaacgcagctgcttcgaacgcggttatagtctcgtcctttgcaataccgaaggcgatgaacagcggatgaatcgcaatctggaaacgctgatgcaaaaacgcgttgatggcttgctgttactgtgcaccgaaacgcatcaaccttcgcgtgaaatcatgcaacgttatccgacagtgcctactgtgatgatggactgggctccgttcgatggcgacagcgatcttattcaggataactcgttgctgggcggagacttagcaacgcaatatctgatcgataaaggtcatacccgtatcgcctgtattaccggcccgctggataaaactccggcgcgcctgcggttggaaggttatcgggcggcgatgaaacgtgcgggtctcaacattcctgatggctatgaagtcactggtgattttgaatttaacggcgggtttgacgctatgcgccaactgctatcacatccgctgcgtcctcaggccgtctttaccggaaatgacgctatggctgttggcgtttatggatttgcccctatatttccagacatctgttatcacttaacccattacaagcccgctgccgcagatattcccgtggcgagcgataacccagcgcactatgcggatgccattcgttataatgctcgaacgcctctgcaaggttctttgctgccgttaacccgtctggtttgggcatgatactgatgtagtcacgctttatcgttttcacgaagctctctgctattccgttactctccggactccgcaccgccgtgttcttcggttcaagtcccaacatccgggcgaactggcgtgtttcattagcccggtagcatgaaccattatccgtcagccactccactggagacgacggaagatcgttgccgaagcggcgttccaccgctcccagcatgacgtcctgtactgtttcactgttgaagccgccggtagtgaccgcccagtgcagtgcctcacgatcacagcagtccagcgcgaacgtgacacgcagtctctctccgttatcacagcagaactcgaacccgtcagagcaccatcgctgattgctttctttcacggccactctgcctgtatgtgcccgtttcgatggcggtacagcaggttttcgctcaagcaacagcgcattctggcgcatgatccggtaaacacgtttggcattgatcgcaggcataccatcaagttctgcctgtctgcgaagcagcgcccatacccgacgataaccatacgttggcagctctccgataacatggtgtatacggagaagcacatccgtatcatcagtgtgacgactgcggcggccatccatccagtcatcggttcgtctgagaatgacgtgcaactgcgcacgcgacacccggagacaacggctgactaagcttactccccatccccgggcaataagggcgcgtgcgctatccacttttttgcccgtccatattcaacggcttctttgaggagttcattttccatcgttttcttgccgagcaggcgctggagttctttaatctgcttcatggcggcagcaagttcagaggcaggaacaacctgttctccggcggcgacagcagtaagacttccttcctggtattgcttacgccagagaaataactggctggctgctacaccatgttgccgggcaacgagggagaccgtcatccccggttcaaagctctgctgaacaattgcgatcttttcctgtgtggtacgccgtctgcgtttctccggccctaagacatcaatcatctgttctccaatgactagtctaaaaactagtattaagactatcacttatttaagtgatattggttgtctggagattcagggggccagtctagtttaccaggcgttatatcaggcagagttacaggttccgcaggatatcgcggtgattggctatgacgatatcgaactggcaagctttatgacgccaccattaaccactatccaccaaccgaaagatgaactgggggagctggcgattgatgtactcatccatcggataacccagccgacccttcagcaacaacgattacaacttactccgattctgatggaacgcggttcggcttagatttacgctgtcttttgatcaaattattaccatcggttgttttcagaagcatgaacattgctgctgaagcaacagtaataatgcccattgtgataaacgtatagtggaattgttcgacagtcgttgtgccttccattccttcataaacgcgaaggacggccgcacttacagcaacgcctaaactaatcgacagttgctgcgtgaccgccagaacactgttaccgctgctggcattgtcatcggtcagatcggcaagtgtgatggtattcatcgcggtaaactgcgtcgacatagccatccctaatataaacaacggcaagatcagcatccatatagccattgctggtgattgcaaagagaactgagcgatcattagcccaataatcaccgtgatccccactaacgtatggcgatagcccagacgacgtaagacttgggtaaccatcgattttgcaataatggaacctaacgctgtcggtgccatcatacagccagcaataaacgcctgataaccaaatcctacctgtaacatcaatggcataaggaacggtacacagccggtccccagacgggttgcaatattgcctacgataccgatcgagaaagtgcgggttttaaataaatctaatgaaattaatgggtttggcgtgcgtcgtgcatggagaatatagagaagcagtaacccgatgctggtgacaattaccgtcaaggcaatccagctggcgacaatcttttccccgaatagctctattccgcttgagaagagaacaaggctgaggccaaacagcaaaaagccagtgatatcgaatctgcgtcgtgcggtggtgaaattgggcatatgtttgcgcgcgtaaagaaggcccgcaatacctatggggatattgattaaaaatatccagtgccaggttgcccaggtgaccagcacgccgccaagaacggggcctaaaattggccccaccagacccggcatggcgacaaaattcaatactggaagaagttcattacgaggataagcgcgcagtaaggccagccgagcaacaggcatcatcattgcgccgcctatcccctgaataacccggaagacaaccagctgtggtagcgaattagaaagtgcgcaggccagagaacccaatgtgaacagactcacggcaagggtaaaaatgcgacgcgtaccgaagcgatcggctagccatccgcttaccggaataagcatcgccaccgtcagcgtataactgatgatggctgattgcatcgcgagaggagaacgattaaggctatgagcgattgcgggtaaggcggtattaagaatagtggcatcaagtgcctgcatgaagaaggccatcgccgcgatccacggcaaacccgccatactgcgcttctttttatcgctcattcaatgtcctgttatcgggttatcacttatcaggtgagcgtagcagcgcctgacaagctttaaatgccgcgtcgccatcgctttggataatcgcatcgacaatcgcctgatgcagatccagctttatcactgtgtcgctggtaattgacgtgaagtaagtgtgataaaccgaatggaatagcgaggcgaatgaggtcaaaaacggattggcgctcatttcatagatatgctcatgccaggccatatcgacttcgatccagcgttcacggcgaaagttctcttttaatgccgccatttcggccattaacgtattgagatgcgctttctgttccgcggtgccaaccgttgctgccagtaggcaggcttgcggctccagacagatacgcataaccagaaagtgatcgatgacctgatgaaagttctcttctgtcatccaccaggtaagcaattcctgatcaagaaaattccagttcgattgtggcatgacccgagtaccaattcgcggtcgcggtaaaaccatcccttttgccgttaacgttttgaccgcttcgcgtaccgctgtacgactcactccaaattgctcgcccagctcaatctcaccgggcaaaatggtgccgggttcatattcaccttttaagatccgttgcgccagcttctcagccagaacatacgaaaggtttttctgtgcagctaactgttgtgcgcttaaaggcattacttatcttcctttttctttttattcctccttagtatgccaccaggaagtgtgattacggttgcaaaaacggcaaattgcttgttttatggcacattaacggggcttttgctgaaaaaatgcgcggtcagaaaattattttaaatttcctcttgtcaggccggaataactccctataatgcgccaccactgacacggaacaacggcaaacacgccgccgggtcagcggggttctcctgagaactccggcagagaaagcaaaaataaatgcttgactctgtagcgggaaagcgtattatgcacaccccgcgccgctgagaaaaagcaaagcggcactgctctttaacaatttatcagacaatctgtgtgggcactcgaagatacggattcttaacgtcgcaagacgaaaaatgaataccaagtctcaagagtgaacacgtaattcattacgaagtttaattctttgagcatcaaacttttaaattgaagagtttgatcatggctcagattgaacgctggcggcaggcctaacacatgcaagtcgaacggtaacaggaaacagcttgctgtttcgctgacgagtggcggacgggtgagtaatgtctgggaaactgcctgatggagggggataactactggaaacggtagctaataccgcataacgtcgcaagaccaaagagggggaccttcgggcctcttgccatcagatgtgcccagatgggattagctagtaggtggggtaacggctcacctaggcgacgatccctagctggtctgagaggatgaccagccacactggaactgagacacggtccagactcctacgggaggcagcagtggggaatattgcacaatgggcgcaagcctgatgcagccatgccgcgtgtatgaagaaggccttcgggttgtaaagtactttcagcggggaggaagggagtaaagttaatacctttgctcattgacgttacccgcagaagaagcaccggctaactccgtgccagcagccgcggtaatacggagggtgcaagcgttaatcggaattactgggcgtaaagcgcacgcaggcggtttgttaagtcagatgtgaaatccccgggctcaacctgggaactgcatctgatactggcaagcttgagtctcgtagaggggggtagaattccaggtgtagcggtgaaatgcgtagagatctggaggaataccggtggcgaaggcggccccctggacgaagactgacgctcaggtgcgaaagcgtggggagcaaacaggattagataccctggtagtccacgccgtaaacgatgtcgacttggaggttgtgcccttgaggcgtggcttccggagctaacgcgttaagtcgaccgcctggggagtacggccgcaaggttaaaactcaaatgaattgacgggggcccgcacaagcggtggagcatgtggtttaattcgatgcaacgcgaagaaccttacctggtcttgacatccacggaagttttcagagatgagaatgtgccttcgggaaccgtgagacaggtgctgcatggctgtcgtcagctcgtgttgtgaaatgttgggttaagtcccgcaacgagcgcaacccttatcctttgttgccagcggtccggccgggaactcaaaggagactgccagtgataaactggaggaaggtggggatgacgtcaagtcatcatggcccttacgaccagggctacacacgtgctacaatggcgcatacaaagagaagcgacctcgcgagagcaagcggacctcataaagtgcgtcgtagtccggattggagtctgcaactcgactccatgaagtcggaatcgctagtaatcgtggatcagaatgccacggtgaatacgttcccgggccttgtacacaccgcccgtcacaccatgggagtgggttgcaaaagaagtaggtagcttaaccttcgggagggcgcttaccactttgtgattcatgactggggtgaagtcgtaacaaggtaaccgtaggggaacctgcggttggatcacctccttaccttaaagaagcgttctttgcagtgctcacacagattgtctgataggaagtgaaaagcaaggcgtcttgcgaagcagactgatacgtccccttcgtctagaggcccaggacaccgccctttcacggcggtaacaggggttcgaatcccctaggggacgccacttgctggtttgtgagtgaaagtcacctgccttaatatctcaaaactcatcttcgggtgatgtttgagatatttgctctttaaaaatctggatcaagctgaaaattgaaacactgaacaacgaaagttgttcgtgagtctctcaaattttcgcaacacgatgatgaatcgaaagaaacatcttcgggttgtgaggttaagcgactaagcgtacacggtggatgccctggcagtcagaggcgatgaaggacgtgctaatctgcgataagcgtcggtaaggtgatatgaaccgttataaccggcgatttccgaatggggaaacccagtgtgtttcgacacactatcattaactgaatccataggttaatgaggcgaaccgggggaactgaaacatctaagtaccccgaggaaaagaaatcaaccgagattcccccagtagcggcgagcgaacggggagcagcccagagcctgaatcagtatgtgtgttagtggaagcgtctggaaaggcgcgcgatacagggtgacagccccgtacacaaaaatgcacatattgtgagctcgatgagtagggcgggacacgtggtatcctgtctgaatatggggggaccatcctccaaggctaaatactcctgactgaccgatagtgaaccagtaccgtgagggaaaggcgaaaagaaccccggcgaggggagtgaaaaagaacctgaaaccgtgtacgtacaagcagtgggagcacgcttaggcgtgtgactgcgtaccttttgtataatgggtcagcgacttatattctgtagcaaggttaaccgaataggggagccgaagggaaaccgagtcttaactgggcgttaagttgcagggtatagacccgaaacccggtgatctagccatgggcaggttgaaggttgggtaacactaactggaggaccgaaccgactaatgttgaaaaattagcggatgacttgtggctgggggtgaaaggccaatcaaaccgggagatagctggttctccccgaaagctatttaggtagcgcctcgtgaattcatctccgggggtagagcactgtttcggcaagggggtcatcccgacttaccaacccgatgcaaactgcgaataccggagaatgttatcacgggagacacacggcgggtgctaacgtccgtcgtgaagagggaaacaacccagaccgccagctaaggtcccaaagtcatggttaagtgggaaacgatgtgggaaggcccagacagccaggatgttggcttagaagcagccatcatttaaagaaagcgtaatagctcactggtcgagtcggcctgcgcggaagatgtaacggggctaaaccatgcaccgaagctgcggcagcgacgcttatgcgttgttgggtaggggagcgttctgtaagcctgcgaaggtgtgctgtgaggcatgctggaggtatcagaagtgcgaatgctgacataagtaacgataaagcgggtgaaaagcccgctcgccggaagaccaagggttcctgtccaacgttaatcggggcagggtgagtcgacccctaaggcgaggccgaaaggcgtagtcgatgggaaacaggttaatattcctgtacttggtgttactgcgaaggggggacggagaaggctatgttggccgggcgacggttgtcccggtttaagcgtgtaggctggttttccaggcaaatccggaaaatcaaggctgaggcgtgatgacgaggcactacggtgctgaagcaacaaatgccctgcttccaggaaaagcctctaagcatcaggtaacatcaaatcgtaccccaaaccgacacaggtggtcaggtagagaataccaaggcgcttgagagaactcgggtgaaggaactaggcaaaatggtgccgtaacttcgggagaaggcacgctgatatgtaggtgaagcgacttgctcgtggagctgaaatcagtcgaagataccagctggctgcaactgtttattaaaaacacagcactgtgcaaacacgaaagtggacgtatacggtgtgacgcctgcccggtgccggaaggttaattgatggggtcagcgcaagcgaagctcttgatcgaagccccggtaaacggcggccgtaactataacggtcctaaggtagcgaaattccttgtcgggtaagttccgacctgcacgaatggcgtaatgatggccaggctgtctccacccgagactcagtgaaattgaactcgctgtgaagatgcagtgtacccgcggcaagacggaaagaccccgtgaacctttactatagcttgacactgaacattgagccttgatgtgtaggataggtgggaggctttgaagtgtggacgccagtctgcatggagccgaccttgaaataccaccctttaatgtttgatgttctaacgtggacccgtgatccgggttgcggacagtgtctggtgggtagtttgactggggcggtctcctcctaaagagtaacggaggagcacgaaggttggctaatcctggtcggacatcaggaggttagtgcaatggcataagccagcttgactgcgagcgtgacggcgcgagcaggtgcgaaagcaggtcatagtgatccggtggttctgaatggaagggccatcgctcaacggataaaaggtactccggggataacaggctgataccgcccaagagttcatatcgacggcggtgtttggcacctcgatgtcggctcatcacatcctggagctgaagtaggtcccaagggtatggctgttcgccatttaaagtggtacgcgagctgggtttagaacgtcgtgagacagttcggtccctatctgccgtgggcgctggagaactgaggggggctgctcctagtacgagaggaccggagtggacgcatcactggtgttcgggttgtcatgccaatggcactgcccggtagctaaatgcggaagagataagtgctgaaagcatctaagcacgaaacttgccccgagatgagttctccctgactccttgagagtcctgaaggaacgttgaagacgacgacgttgataggccgggtgtgtaagcgcagcgatgcgttgagctaaccggtactaatgaaccgtgaggcttaaccttacaacgccgaagatgttttggcggatgagagaagattttcagcctgatacagattaaatcagaacgcagaagcggtctgatgaaacagaatttgcctggcggccgtagcgcggtggtcccacctgaccccatgccgaactcagaagtgaaacgccgtagcgccgatggtagtgtggggtctccccatgcgagagtagggaactgccaggcatcaaattaagcagtaagccggtcataaaaccggtggttgtaaaagaattcggtggagcggtagttcagtcggttagaatacctgcctgtcacgcagggggtcgcgggttcgagtcccgtccgttccgccaccctaattaggggcgtagttcaattggtagagcaccggtctccaaaaccgggtgttgggagttcgagtctctccgcccctgccagaaatcatccttagcgaaagctaaggattttttttatctgaaataaccctctccgaagtaaatccttctaccggcatccttgccagccattcatattaatacacttcatccagcacgttaattttcaaaagatcgcgaatcaacgcatttttatcgctattttgcagccatatggcataaagcggccgtgaaagtgttgtgctatcgacaacggtatgcaggccgccttttttacgcgcccagctgacgggtagccaggtgcaaccattaagcatcgcaatctgttgctgtgccagttcagcagaactggttgtcagaatgggcacttcgtcagcaccgatcaaacctgcctcatgctgttgaaaatctggcccccactcaagtcgcagataattaagatctccctttagttttgaaggggcactggtataaagcgctaaagtgaaatatcccagcaactgactactaaattcgtccattttgggcgcttcagtggtaataagaagatcaagctggcgttcatgcagctgttttaccagagactgccgttgggcaattcgcgcttcgaactgtaagcctgtatgggcatcctgattttgatacaagcgtcccagccactgattaagcatacattcccacaacgaggcgctggcaccgatagaaaactcgttatgtcgtgaggtatgcgccacctccttacgggcggcctgccaggtgctcatgagcgtttctgcataaggcagtagtttttcaccggcagcggttaaacggatattgtttctgtggcgggtgaaaaggttcacacccagttgattttccagttgtctgattcgaaagctcactgctgactgggtcagatagagcgattcagccgctcgaccaaagtgacgcgttcggctaacttccaggaaagtttttaacaattccgtatccacagtgctctccgcaaaattatttgtcgttatgatttaaatgttttgttttacactctgtcaagcgtaactaatactccgcgccataactagctcggtcaaagaattaggagcgtgcaggatggcggaaagctttacgacgactaatcgatatttcgacaataaacattatccacgtggattctctcgtcatggtgatttcaccatcaaagaggcacaactgcttgagcgtcatggttatgccttcaatgagttggatcttggcaaacgcgagccggttaccgaggaagagaaactcttcgtagcagtatgccgtggcgaacgtgagccagtgacagaagcagaacgcgtgtggtccaagtatatgacgcgtattaagcgtccaaaacgttttcacaccctttccggcggtaaaccgcaggttgaaggtgctgaagactacaccgattctgacgattaataaaaagggcgaaatgccctttttttatgtcagtagtttctgcagatggatgagcaaacggtcaatcgctcgatagctaactgcctcctgcaaatgctgacgtgtgataatgtcagactgatcaatatcagcaatggttcgtgcaactttcaataaccgctgccaggcacgaatcgataaccccagatggatcagtgttccttccaaccacatcgcatcttcgctctcaagtttgcagaattggcgtatttccggactatccagccaggcattcagtttattctgccgcttaaattggcgctctctggcggccattacgcgttgtttaacggtggcgctgctttctcccggcactaccgttttactcaaaatgccggggggtggtaatgggatctccagtgagagatcgaagcggtcgagaaagggccccgagagccggttgagataacgtaatgtctgttctggcgtgcagcggttatggtttccctgataatgtccggtagggctgggattcatcgccgcaacaagctggaaacgggctggataggttatttttgctcgtgtgcgtgaaagatggatctgcccggattcaatcggctctcgcaaggcatccagtgtacgccgttcaaattcaggtagctcatcaagaaaaagcacgccgttatgcgccagcgaaatttcaccgggccctggaattgcgccaccgcctaccatcgcagttaacgatgcactgtgatgaggtgagcggaacgggcgctgccgccattgtttttgtactgattcagcatttaccagacttaatatcgcagcactctccagtgcctcttcattgcttaaatctggcaacaggccattaatacggctggcgagcattgttttacctgttcccggcggcccaatcagtaaaaggttgtgcccgccagcagcggtaatttccagtcctcgctttccttgttcctgaccgataacatcactgagatcatgttgtagcgcccgggatactgcatcagttggtttcgggcgttcgagagcgtgcttaccttccagaaacgcacagacagcttgcagatgatcggctatcaggcatccttcaccgttaattagccccacttcatcttcgttatctttcgcgacgataatttttctgcccgacttaatagcttcagttgcactggagattgcgccgggaacgccacgcagagcgcctgtaagcgccagttctccgactaattcatattcatctaacttattggctgtaagctgttctgaggccgccagcaacgcaatggcgataggtaaatcatatcgtcccccttcttttggcagatcagctggagccaggttgatggtgatttttttcgccggatattcatatccgctattgataatggcgctgcgcacgcgatcgcgagcttcttttaccgttgtttctggtaagcccaccatcgttaagccgggtagacctttactgatatgtacctcaacagtgatcgggggcgcatttactcccagggctgcgcgggtatgaacaattgacagtgacataagccctccttgagtcaccattatgtgcataagatatcgctgctgtagcccgctaattcgtgaattttagtggctgattcctgtttatttgtgcaagtgaagttgagttgttctggcggtggaatgatgctcgcaaaaatgcagcggacaaaggatgaactacgaggaagggaacaacattcatactgaaattgaatttttttcactcactattttatttttaaaaaacaacaatttatattgaaattattaaacgcatcataaaaatcggccaaaaaatatcttgtactatttacaaaacctatggtaactctttaggcattccttcgaacaagatgcaagaaaagacaaaatgacagcccttctacgagtgattagcctggtcgtgattagcgtggtggtgattattatcccaccgtgcggggctgcacttggacgaggaaaggcttagagatcaagccttaacgaactaagacccccgcaccgaaaggtccgggggttttttttgaccttaaaaacataaccgaggagcagacaatgaataacagcacaaaattctgtttctcaagattcaggacggggaactaactatgaatggcgcacagtgggtggtacatgcgttgcgggcacagggtgtgaacaccgttttcggttatccgggtggcgcaattatgccggtttacgatgcattgtatgacggcggcgtggagcacttgctatgccgacatgagcagggtgcggcaatggcggctatcggttatgctcgtgctaccggcaaaactggcgtatgtatcgccacgtctggtccgggcgcaaccaacctgataaccgggcttgcggacgcactgttagattccatccctgttgttgccatcaccggtcaagtgtccgcaccgtttatcggcactgacgcatttcaggaagtggatgtcctgggattgtcgttagcctgtaccaagcacagctttctggtgcagtcgctggaagagttgccgcgcatcatggctgaagcattcgacgttgcctgctcaggtcgtcctggtccggttctggtcgatatcccaaaagatatccagttagccagcggtgacctggaaccgtggttcaccaccgttgaaaacgaagtgactttcccacatgccgaagttgagcaagcgcgccagatgctggcaaaagcgcaaaaaccgatgctgtacgttggcggtggcgtgggtatggcgcaggcagttccggctttgcgtgaatttctcgctgccacaaaaatgcctgccacctgtacgctgaaagggctgggcgcagtagaagcagattatccgtactatctgggcatgctggggatgcacggcaccaaagcggcaaacttcgcggtgcaggagtgtgacctgctgatcgccgtgggcgcacgttttgatgaccgggtgaccggcaaactgaacaccttcgcgccacacgccagtgttatccatatggatatcgacccggcagaaatgaacaagctgcgtcaggcacatgtggcattacaaggtgatttaaatgctctgttaccagcattacagcagccgttaaatcaatgactggcagcaacactgcgcgcagctgcgtgatgaacattcctggcgttacgaccatcccggtgacgctatctacgcgccgttgttgttaaaacaactgtcggatcgtaaacctgcggattgcgtcgtgaccacagatgtggggcagcaccagatgtgggctgcgcagcacatcgcccacactcgcccggaaaatttcatcacctccagcggtttaggtaccatgggttttggtttaccggcggcggttggcgcacaagtcgcgcgaccgaacgataccgttgtctgtatctccggtgacggctctttcatgatgaatgtgcaagagctgggcaccgtaaaacgcaagcagttaccgttgaaaatcgtcttactcgataaccaacggttagggatggttcgacaatggcagcaactgttttttcaggaacgatacagcgaaaccacccttactgataaccccgatttcctcatgttagccagcgccttcggcatccatggccaacacatcacccggaaagaccaggttgaagcggcactcgacaccatgctgaacagtgatgggccatacctgcttcatgtctcaatcgacgaacttgagaacgtctggccgctggtgccgcctggcgccagtaattcagaaatgttggagaaattatcatgatgcaacatcaggtcaatgtatcggctcgcttcaatccagaaaccttagaacgtgttttacgcgtggtgcgtcatcgtggtttccacgtctgctcaatgaatatggccgccgccagcgatgcacaaaatataaatatcgaattgaccgttgccagcccacggtcggtcgacttactgtttagtcagttaaataaactggtggacgtcgcacacgttgccatctgccagagcacaaccacatcacaacaaatccgcgcctgagcgcaaaaggaatataaaaatgaccacgaagaaagctgattacatttggttcaatggggagatggttcgctgggaagacgcgaaggtgcatgtgatgtcgcacgcgctgcactatggcacttcggtttttgaaggcatccgttgctacgactcgcacaaaggaccggttgtattccgccatcgtgagcatatgcagcgtctgcatgactccgccaaaatctatcgcttcccggtttcgcagagcattgatgagctgatggaagcttgtcgtgacgtgatccgcaaaaacaatctcaccagcgcctatatccgtccgctgatcttcgtcggtgatgttggcatgggagtaaacccgccagcgggatactcaaccgacgtgattatcgctgctttcccgtggggagcgtatctgggcgcagaagcgctggagcaggggatcgatgcgatggtttcctcctggaaccgcgcagcaccaaacaccatcccgacggcggcaaaagccggtggtaactacctctcttccctgctggtgggtagcgaagcgcgccgccacggttatcaggaaggtatcgcgctggatgtgaacggttatatctctgaaggcgcaggcgaaaacctgtttgaagtgaaagatggtgtgctgttcaccccaccgttcacctcctccgcgctgccgggtattacccgtgatgccatcatcaaactggcgaaagagctgggaattgaagtacgtgagcaggtgctgtcgcgcgaatccctgtacctggcggatgaagtgtttatgtccggtacggcggcagaaatcacgccagtgcgcagcgtagacggtattcaggttggcgaaggccgttgtggcccggttaccaaacgcattcagcaagccttcttcggcctcttcactggcgaaaccgaagataaatggggctggttagatcaagttaatcaataaatacaaaaaatgggacggcacgcaccgtcccatttacgagacagacactgggagtaaataaagtatgcctaagtaccgttccgccaccaccactcatggtcgtaatatggcgggtgctcgtgcgctgtggcgcgccaccggaatgaccgacgccgatttcggtaagccgattatcgcggttgtgaactcgttcacccaatttgtaccgggtcacgtccatctgcgcgatctcggtaaactggtcgccgaacaaattgaagcggctggcggcgttgccaaagagttcaacaccattgcggtggatgatgggattgccatgggccacggggggatgctttattcactgccatctcgcgaactgatcgctgattccgttgagtatatggtcaacgcccactgcgccgacgccatggtctgcatctctaactgcgacaaaatcaccccggggatgctgatggcttccctgcgcctgaatattccggtgatctttgtttccggcggcccgatggaggccgggaaaaccaaactttccgatcagatcatcaagctcgatctggttgatgcgatgatccagggcgcagacccgaaagtatctgactcccagagcgatcaggttgaacgttccgcgtgtccgacctgcggttcctgctccgggatgtttaccgctaactcaatgaactgcctgaccgaagcgctgggcctgtcgcagccgggcaacggctcgctgctggcaacccacgccgaccgtaagcagctgttccttaatgctggtaaacgcattgttgaattgaccaaacgttattacgagcaaaacgacgaaagtgcactgccgcgtaatatcgccagtaaggcggcgtttgaaaacgccatgacgctggatatcgcgatgggtggatcgactaacaccgtacttcacctgctggcggcggcgcaggaagcggaaatcgacttcaccatgagtgatatcgataagctttcccgcaaggttccacagctgtgtaaagttgcgccgagcacccagaaataccatatggaagatgttcaccgtgctggtggtgttatcggtattctcggcgaactggatcgcgcggggttactgaaccgtgatgtgaaaaacgtacttggcctgacgttgccgcaaacgctggaacaatacgacgttatgctgacccaggatgacgcggtaaaaaatatgttccgcgcaggtcctgcaggcattcgtaccacacaggcattctcgcaagattgccgttgggatacgctggacgacgatcgcgccaatggctgtatccgctcgctggaacacgcctacagcaaagacggcggcctggcggtgctctacggtaactttgcggaaaacggctgcatcgtgaaaacggcaggcgtcgatgacagcatcctcaaattcaccggcccggcgaaagtgtacgaaagccaggacgatgcggtagaagcgattctcggcggtaaagttgtcgccggagatgtggtagtaattcgctatgaaggcccgaaaggcggtccggggatgcaggaaatgctctacccaaccagcttcctgaaatcaatgggtctcggcaaagcctgtgcgctgatcaccgacggtcgtttctctggtggcacctctggtctttccatcggccacgtctcaccggaagcggcaagcggcggcagcattggcctgattgaagatggtgacctgatcgctatcgacatcccgaaccgtggcattcagttacaggtaagcgatgccgaactggcggcgcgtcgtgaagcgcaggacgctcgaggtgacaaagcctggacgccgaaaaatcgtgaacgtcaggtctcctttgccctgcgtgcttatgccagcctggcaaccagcgccgacaaaggcgcggtgcgtgataaatcgaaactggggggttaataatggctgactcgcaacccctgtccggtgctccggaaggtgccgaatatttaagagcagtgctgcgcgcgccggtttacgaggcggcgcaggttacgccgctacaaaaaatggaaaaactgtcgtcgcgtcttgataacgtcattctggtgaagcgcgaagatcgccagccagtgcacagctttaagctgcgcggcgcatacgccatgatggcgggcctgacggaagaacagaaagcgcacggcgtgatcactgcttctgcgggtaaccacgcgcagggcgtcgcgttttcttctgcgcggttaggcgtgaaggccctgatcgttatgccaaccgccaccgccgacatcaaagtcgacgcggtgcgcggcttcggcggcgaagtgctgctccacggcgcgaactttgatgaagcgaaagccaaagcgatcgaactgtcacagcagcaggggttcacctgggtgccgccgttcgaccatccgatggtgattgccgggcaaggcacgctggcgctggaactgctccagcaggacgcccatctcgaccgcgtatttgtgccagtcggcggcggcggtctggctgctggcgtggcggtgctgatcaaacaactgatgccgcaaatcaaagtgatcgccgtagaagcggaagactccgcctgcctgaaagcagcgctggatgcgggtcatccggttgatctgccgcgcgtagggctatttgctgaaggcgtagcggtaaaacgcatcggtgacgaaaccttccgtttatgccaggagtatctcgacgacatcatcaccgtcgatagcgatgcgatctgtgcggcgatgaaggatttattcgaagatgtgcgcgcggtggcggaaccctctggcgcgctggcgctggcgggaatgaaaaaatatatcgccctgcacaacattcgcggcgaacggctggcgcatattctttccggtgccaacgtgaacttccacggcctgcgctacgtctcagaacgctgcgaactgggcgaacagcgtgaagcgttgttggcggtgaccattccggaagaaaaaggcagcttcctcaaattctgccaactgcttggcgggcgttcggtcaccgagttcaactaccgttttgccgatgccaaaaacgcctgcatctttgtcggtgtgcgcctgagccgcggcctcgaagagcgcaaagaaattttgcagatgctcaacgacggcggctacagcgtggttgatctctccgacgacgaaatggcgaagctacacgtgcgctatatggtcggcggacgtccatcgcatccgttgcaggaacgcctctacagcttcgaattcccggaatcaccgggcgcgctgctgcgcttcctcaacacgctgggtacgtactggaacatttctttgttccactatcgcagccatggcaccgactacgggcgcgtactggcggcgttcgaacttggcgaccatgaaccggatttcgaaacccggctgaatgagctgggctacgattgccacgacgaaaccaataacccggcgttcaggttctttttggcgggttagggaaaaatgcctgatagcgcttcgcttatcaggcctacccgcgcgacaacgtcatttgtggttcggcaaaatcttccagaatgcctcaattagcggctcatgtagccgctttttctgcgcacacacgcccagctcaaacggcgttttctcatcgctgcgctctaaaatcatcacgcggttacgcaccggttcggggctgttttccagcaccacttccggcaacaatgccacgccacagccgagtgccaccatcgataccatcgcttcatgcccgccaaccgtggcgtaaatcatcgggttactgattttattgcgtcgaaaccacagttcaatgcggcggcgtaccggcccctgatcggccataataaacggcaccgttgaccagtccggcttctctaccgacacctgattacgcaccgggcagggcagcgcgggggcaatcagcactactgccagattctccagcatcgaaaacgccactgcgccgggcaaggtttccggtttacccgcaatcgccagatccgcttcaccagtgaccaccttttccatcgcatctgccgcatcaccagtagtaagtttaatctccaccgacgggtgttccgcgcggaagcgatccagaatcggcggcagatggctgtaggcagcggtcaccgagcagaagatatgtaattcgccagagagcgacggcccttgctgatcgatggtgtggcgcaactgctgatactgcaacagcgtttgctgggcgaaaacgcgcagctcttcgcccgcttcagtcagcgtcaccgtgcggttatcgcgcacaaacagcggctgaccgagatcttcttccaggcgctgaatctgccgtgagagcgtggatgggctaacgtgcatcgcccgcgcgctgcggccaaaatggcggctttccgccagatgcaggaaggttttcagatcgcgtaaatccacagggacagccctcgatgttgacgttgcaaaaattgcaatgtgacgttgtgaatatatcaatttccgcaataaatttcctgtcatatagtgaattcaatctcgcaaacgcgaaccgaacaataagaagcacaacatcacgaggaatcaccatggctaactacttcaatacactgaatctgcgccagcagctggcacagctgggcaaatgtcgctttatgggccgcgatgaattcgccgatggcgcgagctaccttcagggtaaaaaagtagtcatcgtcggctgtggcgcacagggtctgaaccagggcctgaacatgcgtgattctggtctcgatatctcctacgctctgcgtaaagaagcgattgccgagaagcgcgcgtcctggcgtaaagcgaccgaaaatggttttaaagtgggtacttacgaagaactgatcccacaggcggatctggtgattaacctgacgccggacaagcagcactctgatgtagtgcgcaccgtacagccactgatgaaagacggcgcggcgctgggctactcgcacggtttcaacatcgtcgaagtgggcgagcagatccgtaaagatatcaccgtagtgatggttgcgccgaaatgcccaggcaccgaagtgcgtgaagagtacaaacgtgggttcggcgtaccgacgctgattgccgttcacccggaaaacgatccgaaaggcgaaggcatggcgattgccaaagcctgggcggctgcaaccggtggtcaccgtgcgggtgtgctggaatcgtccttcgttgcggaagtgaaatctgacctgatgggcgagcaaaccatcctgtgcggtatgttgcaggctggctctctgctgtgcttcgacaagctggtggaagaaggtaccgatccagcatacgcagaaaaactgattcagttcggttgggaaaccatcaccgaagcactgaaacagggcggcatcaccctgatgatggaccgtctctctaacccggcgaaactgcgtgcttatgcgctttctgaacagctgaaagagatcatggcacccctgttccagaaacatatggacgacatcatctccggcgaattctcttccggtatgatggcggactgggccaacgatgataagaaactgctgacctggcgtgaagagaccggcaaaaccgcgtttgaaaccgcgccgcagtatgaaggcaaaatcggcgagcaggagtacttcgataaaggcgtactgatgattgcgatggtgaaagcgggcgttgaactggcgttcgaaaccatggtcgattccggcatcattgaagagtctgcatattatgaatcactgcacgagctgccgctgattgccaacaccatcgcccgtaagcgtctgtacgaaatgaacgtggttatctctgataccgctgagtacggtaactatctgttctcttacgcttgtgtgccgttgctgaaaccgtttatggcagagctgcaaccgggcgacctgggtaaagctattccggaaggcgcggtagataacgggcaactgcgtgatgtgaacgaagcgattcgcagccatgcgattgagcaggtaggtaagaaactgcgcggctatatgacagatatgaaacgtattgctgttgcgggttaagtgcgcgctgatgccctcaccccgaccctctcccacagggagagggagaaaacactcaaggccttctcctggagaaggccttgctattagttgcggtacagcaccttaatgatgtgatatccgaactgggtgtgcagcgggccggtcggctccagtaccggacaagagaaaaccactttatcgaacgccggaaccatctgaccctggcggaattcacctaaatcaccgccgcgtttgcctgatgggcaaatggagtgtttcttcgccagcttgccgaaatcggccccgttcttaatctgctcgagaagatccagagccagtttctcttcttttacaaggatatgcagtgctgctgctgtttttgccatgatcgtgccttgagtgaataattgtcaggcggcgattttagcatgatccgcagatgctaacgtaattgtcagtcagggagtggctggtacatatatggcaaaagcccggaaaatccgggcttcgcaggtccctcaaggggagaaaacttagggcctctatgggctacaaagtcattatcggggatggttattttattgtcaatttatgagcgatatggcattgattgacttgatgaccgccctctgtatgtctgcaaccaactcatgtggcaaacattgattaagataccctctgtaagtccttgctctgtttaatctgtttcgactgacttgttgtaccaggtcggctttggcccaacgaatctgctgatcaaagaattgcaggtcattgataacattactggctatttcaacatgcattccacgttttaacttgtctggtcgcgagtggttgataatggaacgacgatgcatgcgttgccattaatttttccgttgagcacgacaactaacctgttttttatcatttcaggaggaatgcggccatcgtaatacgtcgtgctgaacggtccattttggctaacaggatagttaccaaagttgcattccagtatttcaccaaccttagggctgaaattaatcgccacgagtaaacctctccttagtaaactctgaaaaagtaataacacaacgttacgacccgatattttctaagtctaatggattcacgatgaactccgatttcggtcttctctctctgatttaaacatccgcagccaaccggttagcggcttacacgcggtcacattcaaatgcgattctgctacaatcctccccccgttcgaagattgagcaatacacctatgcgtctaaaccccggccaacaacaagctgtcgaattcgttaccggcccctgcctggtgctggcgggcgcgggttccggtaaaactcgtgttatcaccaataaaatcgcccatctgatccgcggttgcggttatcaggcgcggcacattgcggcggtgacctttactaataaagcagcgcgcgagatgaaagagcgtgtagggcagacgctggggcgcaaagaggcgcgtgggctgatgatctccactttccatacgttggggctggatatcatcaaacgcgagtatgcggcgcttgggatgaaagcgaacttctcgttgtttgacgataccgatcagcttgctttgcttaaagagttgaccgaggggctgattgaagatgacaaagttctcctgcaacaactgatttcgaccatctctaactggaagaatgatctcaaaacaccgtcccaggcggcagcaagtgcgattggcgagcgggaccgtatttttgcccattgttatgggctgtatgatgcacacctgaaagcctgtaacgttctcgacttcgatgatctgattttattgccgacgttgctgctgcaacgcaatgaagaagtccgcaagcgctggcagaacaaaattcgctatctgctggtggatgagtatcaggacaccaacaccagccagtatgagctggtgaaactgctggtgggcagccgcgcgcgctttaccgtggtgggtgacgatgaccagtcgatctactcctggcgcggtgcacgtccgcaaaacctggtgctgctgagtcaggattttccggcgctgaaggtgattaagcttgagcagaactatcgctcttccgggcgtattctgaaagcggcgaacatcctgatcgccaataacccgcacgtctttgaaaagcgtctgttctccgaactgggttatggcgcggagctaaaagtattaagcgcgaataacgaagaacatgaggctgagcgcgttactggcgagctgatcgcccatcacttcgtcaataaaacgcagtacaaagattacgccattctttatcgcggtaaccatcagtcgcgggtgtttgaaaaattcctgatgcaaaaccgcatcccgtacaaaatatctggtggtacgtcgtttttctctcgtcctgaaatcaaggacttgctggcttatctgcgcgtgctgactaacccggacgatgacagcgcatttctgcgtatcgttaacacgccgaagcgagagattggcccggctacgctgaaaaagctgggtgagtgggcgatgacgcgcaataaaagcatgtttaccgccagctttgatatgggcctgagtcagacgcttagcggacgtggttatgaagcattgacccgcttcactcactggttggcagaaatccagcgtctggcggagcgggagccgattgccgcggtgcgtgatctgatccatggcatggattatgaatcctggctgtacgaaacatcgcccagcccgaaagccgccgaaatgcgcatgaagaacgtcaaccaactgtttagctggatgacggagatgctggaaggcagtgaactggatgagccgatgacgctcacccaggtggtgacgcgctttactttgcgcgacatgatggagcgtggtgagagtgaagaagagctggatcaggtgcaactgatgactctccacgcgtcgaaagggctggagtttccttatgtctacatggtcggtatggaagaagggtttttgccgcaccagagcagcatcgatgaagataatatcgatgaggagcggcggctggcctatgtcggcattacccgcgcccagaaggaattgacctttacgctgtgtaaagaacgccgtcagtacggcgaactggtgcgcccggagccgagccgctttttgctggagctgccgcaggatgatctgatttgggaacaggagcgcaaagtggtcagcgccgaagaacggatgcagaaagggcaaagccatctggcgaatctgaaagcgatgatggcggcaaaacgagggaaataatcaaggccggaaaagatgcgtcagcatcgcatccggcacttactcattaatgcacttccagcggccagtggacatagctctgccactggctttcctgagcaataatctctttacccagcggatgttgggttagccaaccttgcggaagcgtcaaggtcaacagttcatggttagcctgtaatgtcatctctggcacgagatcgtcacggcgacggctggcaaaaatgatggccaggcgtagtaaacggcagagttgttctgcgacgcgcggcggtacggcattttgctgatgcagcgatgagagatcgaccggattagtctggttgagcagtagcgtcgccagcaattttttctgtgcgggggtaaaaccgggaagatccagattacgcaccagataagcagcgtgttgcggcgcttgtttgaagtcaacgctcaggccgatttcatgaagctgacaggcgctgatgagcaaatcgcggcttattgcttcaagatgccattcgttttccacctgatcgaagaagttagccgcaactttggctacgcgctgtgcctgatcaatatcgatcataaagcggcgttgaatattacgcagcgtacggctgcgaatatcctgctcgacggccagatgcaacatgccgtagaccaggccttcacgcagcgcaccgcccgccagggtcatacactgaatattcagttcggtaaaaatggcgatcaggatcgccagaccactcgggaacactaacgcacgttccagcgtcagcccgtcaatctccagttcctccagccgaccgcaatgaatggctcgctgtttcaattgctgcaacttttccagggtaatgcgttcatccatcccctgtgccatcatgatttcctgtaacgcctgcacggtgccggaagcaccaacgcacactttccagccgtgataccgtaattcatcggcaaccggacgtaacacttcgcgtgccgctttttctgcagcatcaaaattttcctgccccagattacgatcggcaaaatagcgttccagccaggtgacgcagcccatcgacaggctgaacaacgaggtggtttgtgcacccgtgccggttaccagttcagtactggctccgcctatatccaccaccaggcgctgatcggcaccaccagtggtgtgagcaacgccctgataaatcagacgtgcttcctcttcaccgctgatcacctgtaccggacaaccgagaatttcctgcgctttggcaataaaatcacccgcattgacggcaaggcgtaacgtcgccgtagcgacaacgcgaatttgcgagggaggaatatcttgcagacgttcagcaaacaggcgcaaacattgccaaccgcgctccattgcttcattggagagggcattttcgctattcaggccagcagccagacgcactttgcgttttattcgcgtcagcgtctggatgcttccagccacctcgcgcacaaccagcatatgaaaactattcgaaccgagatcaatggctgcatacagcgacgaggtggaacccatactcttcatccttcaatctgtctctgtgttggctgcattctttcacctgaatcacttactacagtaagctcatcgggattcattctcttgccatcttgatacagtttgaatgattttgagtatgacattttttatttaacctgaacgacgacgattacgcggagcgccagtacgacgcggaccattgcctgtgcgcgggcgcgtgaggcgcagcggttttggcagatcggtcatcaatgcgtccggattgtatttgcttaccggaattgagtgaccaatataggtctcaatagcaggcaaattcaatgcatactcttcacacgccaggctgatagagtgaccgcttgcgcctgcgcgacctgtacgaccaatacggtgaacgtaatcttcacagtcatcgggtaaatcgtagttaaagacgtgcgtcactgccggaatatgcaaaccacgcgcggcaacgtcggtggcaaccagaatatccagatcgccacgggtaaattcatcaagaatacgcagacgttttttctgcgcgacatcgcctgtcaataaaccgacacgatgaccatctgctgccaggtggccccagatctcttcacaacggtgtttggtgttggcgaaaataatcgctctgtctggccactcttcttcgatcagcgtttgcagcaaacgcattttttcttcgttagaagggtagaaaagctcttctttaatacggtggcccgttttctgttccggttccacttcaatatattcggcattgttcatctgctcgaacgccagttcacgtacccggtacgaaagcgtggcggagaacagcatgttgaggcgctggtttgcaggcggcatacggcggaacagccagcggatatctttaataaagcccagatcgtacatgcgatcggcttcgtccagtaccaccacctgaatggcaccgaggttaatgtggttctgcttggcgtagtcaattaaacgccccgtggtgccaatcagaatgtcaacgccgctttccagcactttcagctgtttgtcgtagccatcaccaccgtaagccagacccagcttcaggccagtagcttccgccagcggttctgcgtcggcatggatctgcacggcaagttcacgcgtcggtgccataattaaggcacgcggctgattcaccttgcgatcggcaatcgcaggatgagagagaagataatgaaacgttgacgtaagaaacgccatcgttttcccggtaccggtttgcgcctgcccggctacgtcacgacccgccagcgtcagcggaagggccagtgcctgaatgggcgtacagttatgaaacccttttttttcaagggcttctacaaccttcggatgcagggcgaagtcggaaaacttctgttctgttaaatgtgttttgctcatagtgtggtagaatatcagcttactattgctttacgaaagcgtatccggtgaaataaagtcaacctttagttggttaatgttacaccaacaacgaaaccaacacgccaggcttattcctgtggagttatatatgagcgataaaattattcacctgactgacgacagttttgacacggatgtactcaaagcggacggggcgatcctcgtcgatttctgggcagagtggtgcggtccgtgcaaaatgatcgccccgattctggatgaaatcgctgacgaatatcagggcaaactgaccgttgcaaaactgaacatcgatcaaaaccctggcactgcgccgaaatatggcatccgtggtatcccgactctgctgctgttcaaaaacggtgaagtggcggcaaccaaagtgggtgcactgtctaaaggtcagttgaaagagttcctcgacgctaacctggcgtaagggaatttcatgttcgggtgccccgtcgctaaaaactggacgcccggcgtgagtcatgctaacttagtgttgacttcgtattaaacataccttattaagtttgaatcttgtaatttccaacgcttcccgttttatcttaaatgcgaagtgaacagatttctggctcgtcactcaatccgtcttgtcgtttcagttctgcgtactctcctgtgaccaggcagcgaaaagacatgagtcgatgaccgtaaacaggcatggatgatcctgccataccattcacaacattaagttcgagatttaccccaagtttaagaactcacaccactatgaatcttaccgaattaaagaatacgccggtttctgagctgatcactctcggcgaaaatatggggctggaaaacctggctcgtatgcgtaagcaggacattatttttgccatcctgaagcagcacgcaaagagtggcgaagatatctttggtgatggcgtactggagatattgcaggatggatttggtttcctccgttccgcagacagctcctacctcgccggtcctgatgacatctacgtttcccctagccaaatccgccgtttcaacctccgcactggtgataccatctctggtaagattcgcccgccgaaagaaggtgaacgctattttgcgctgctgaaagttaacgaagttaacttcgacaaacctgaaaacgcccgcaacaaaatcctctttgagaacttaaccccgctgcacgcaaactctcgtctgcgtatggaacgtggtaacggttctactgaagatttaactgctcgcgtactggatctggcatcacctatcggtcgtggtcagcgtggtctgattgtggcaccgccgaaagccggtaaaaccatgctgctgcagaacattgctcagagcattgcttacaaccacccggattgtgtgctgatggttctgctgatcgacgaacgtccggaagaagtaaccgagatgcagcgtctggtaaaaggtgaagttgttgcttctacctttgacgaacccgcatctcgccacgttcaggttgcggaaatggtgatcgagaaggccaaacgcctggttgagcacaagaaagacgttatcattctgctcgactccatcactcgtctggcgcgcgcttacaacaccgttgttccggcgtcaggtaaagtgttgaccggtggtgtggatgccaacgccctgcatcgtccgaaacgcttctttggtgcggcgcgtaacgtggaagagggcggcagcctgaccattatcgcgacggcgcttatcgataccggttctaaaatggacgaagttatctacgaagagtttaaaggtacaggcaacatggaactgcacctctctcgtaagatcgctgaaaaacgcgtcttcccggctatcgactacaaccgttctggtacccgtaaagaagagctgctcacgactcaggaagaactgcagaaaatgtggatcctgcgcaaaatcattcacccgatgggcgaaatcgatgcaatggaattcctcattaataaactggcaatgaccaagaccaatgacgatttcttcgaaatgatgaaacgctcataaatttgtcttatgccaaaaacgccacgtgtttacgtggcgttttgcttttatatctgtaatcttaatgccgcgctggcgatgttaggaaaattcctggaatttgctggcatgttatgcaatttgcatatcaaatggttaatttttgcacaggactggtgggtttggaacggactttcccttctgaataaaggtcttcgtggttatacttctgctaataattttctctgagagcatgcattgtgaatttactgacagtgagtactgatctcatcagtatttttttattcacgacactgtttctgttttttgcccgtaaggtggcaaaaaaagtcggtttagtggataaaccaaacttccgcaaacgtcaccagggattgatacctctcgttggggggatttcggtttacgcagggatttgcttcacgttcggaattgtcgattactatattccgcatgcatctctctatctcgcttgtgccggtgtgcttgttttcattggcgcgctggatgaccgttttgatatcagcgtaaaaatccgtgccaccatacaggccgctgttggcattgttatgatggtgttcggcaagctttatctcagtagcctgggttatatctttggctcctgggagatggtgctcggaccgtttggttacttcctgacgctatttgccgtctgggcggccattaatgcgttcaacatggttgatggcattgatggcttgctgggcgggttgtcctgcgtctcgtttgcagcaatcggtatgattttgtggttcgacgggcaaaccagcctcgcaatctggtgctttgcgatgatcgccgccatcctgccatacatcatgcttaaccttggtatcctgggtcgccgctacaaagtctttatgggtgatgcgggcagtacgctgattggttttaccgttatctggatcctgctcgaaacgacccagggcaaaacccatcccatcagcccggttaccgctttgtggataatcgccattccgctaatggatatggtggcgattatgtaccgtcgcctgcgtaaaggcatgagcccattctctcctgaccgtcagcatattcaccatttgatcatgcgtgccgggtttacttcccgtcaggcgtttgtgctgattacccttgccgcagcactgctcgcttccattggcgtgctggcagaatattctcattttgtcccggagtgggtcatgctggtgctctttttgctagcattcttcctctatggatattgcattaagcgtgcctggaaagttgctcgctttattaagcgcgtaaaacgcagactgcgtagaaatcgtggtggcagccccaatttaaccaaataaatgaggatgtgatgacacaaccaatgcctgggaaaccggccgaagacgctgaaaatgaactggatattcgtgggttgtttcgtaccttgtgggctgggaagctatggattattggcatggggctggcgtttgcgttaatcgcgctggcgtatacgttttttgctcgtcaggagtggagctcgacggcgattaccgatcgtccaacggtgaatatgctggggggatattactcgcagcagcaatttttgcgtaacctggatgtccgttcaaacatggcttctgccgaccaaccatcggtcatggacgaagcctataaagagtttgttatgcaactggcctcgtgggatacccgcagagagttctggctgcaaaccgactattacaaacagcggatggtgggcaacagcaaagccgatgcggcgttgctggatgaaatgattaacaacatccagtttatccccggagactttacccgcgcggtcaatgacagcgtgaagcttattgccgaaaccgcgcctgacgctaataacctgttacgtcagtatgttgcttttgccagccagcgtgcagccagccatctgaatgatgagctgaaaggcgcatgggcggcgcgtaccatccagatgaaagctcaggtgaagcgtcaggaagaggtggcgaaagccatctacgaccgccggatgaacagcattgagcaggcgctgaaaattgctgagcagcataatatttcgcgcagtgcgacagatgtacctgccgaggaattacctgattcagaaatgttcctgcttgggcgtccaatgcttcaggctcgactggaaaatttacaggccgtcggtccggcctttgatctcgactatgatcagaatcgggccatgttaaacaccctgaatgttggtccaaccctggatccgcgttttcagacctatcgctatttgcgtacgccggaagaaccggtaaaacgcgatagcccacgtcgtgccttcctgatgattatgtggggcattgtcggggggctgatcggggctggtgtcgcattaacccgccgttgctcgaaatagcaacactgctgcggtgagcgcaaaggcgctcgccgcttattcgaagagaatcgatgtgaaagtactgactgtatttggtacgcgcccggaagccatcaagatggcgccgttggtgcatgcgttggcaaaagatcctttttttgaggctaaagtttgcgtcactgcgcagcatcgggagatgctcgatcaggtgctgaaactcttttccattgtacctgactacgatctcaacataatgcagccaggacagggcctgacagagataacctgtcggattctggaagggctaaaacctattcttgccgagttcaaaccagacgtcgtgctggttcacggcgatacgacgacgacgctggcaaccagcctggcggcgttttatcagcgtattcctgttggtcacgttgaggctggtctgcgcacgggcgatctctattcgccgtggccggaagaggctaaccgtacattgaccgggcatctggcgatgtatcacttctctccaaccgaaacttcccggcaaaacttgctgcgtgaaaacgttgcggatagccgaatcttcattaccggtaatacagtcattgatgcactgttatgggtgcgtgaccaggtgatgagcagcgacaagctgcgttcagaactggcggcaaattacccgtttatcgaccccgataaaaagatgattctggtgaccggtcacaggcgtgagagtttcggtcgtggctttgaagaaatctgccacgcgctggcagacatcgccaccacgcaccaggacatccagattgtctatccggtgcatctcaacccgaacgtcagagaaccggtcaatcgcattctggggcatgtgaaaaatgtcattctgatcgatccccaggagtatttaccgtttgtctggctgatgaaccacgcctggctgattttgaccgactcaggcggcattcaggaagaagcgccttcgctggggaaacctgtgctggtgatgcgcgataccactgagcgtccggaagcggtgacggcgggtacggtgcgtctggtaggcacggataagcagcgaattgtcgaggaagtgacgcgtcttttaaaagacgaaaacgaatatcaagctatgagccgcgcccataacccgtatggtgatggtcaggcatgctctcgcattctggaagcgttaaaaaataatcggatatcactatgagttttgcgaccatttctgttatcggactgggttatatcgggctgccaacggcagcagcgtttgcctcacggcaaaaacaggtaattggtgtcgatatcaaccaacatgcggttgataccatcaatcgtggcgaaatccatatcgtcgaacctgatttggcgagtgtagtaaaaactgccgtagaaggcggttttttacgagcgagcacgacgccagttgaagcggatgcctggctgattgctgtacccacgccgtttaagggcgatcatgagccagatatgacctacgttgaatcggctgctcgctccattgcgccagtgctgaaaaaaggcgcgctggtgatccttgaatccacctcgccggtggggtcaaccgagaagatggcagaatggttagcagagatgcgtccggatctcactttcccgcagcaggtgggcgagcaggcggacgtcaacattgcttactgcccggaacgcgtgttaccaggacaggtaatggtcgagctgattaaaaacgatcgcgtgattggtggtatgacgccggtttgttcggcccgcgccagcgaactgtacaaaattttcctcgaaggtgagtgtgtcgtcactaactcgcggacggcggaaatgtgtaagctcaccgaaaacagcttccgcgatgtgaatatcgcttttgctaatgaattgtcgctgatttgtgccgatcaggggattaacgtctgggaactgattcgcctggcgaatcgtcaccctcgcgttaatattcttcagcctggccctggcgtgggcggtcactgcattgctgttgatccgtggtttatcgtggcacagaacccccagcaggcgcggcttatccgtaccgcgcgcgaagtgaacgatcacaaaccgttctgggttatcgatcaggtgaaagcggcggtggctgattgcctggcggctaccgataaacgcgccagtgaactgaaaatcgcctgctttggtctggcgtttaaaccgaatattgatgacctgcgcgaaagcccggcgatggaaatcgctgaactgatcgcccagtggcatagcggcgaaactctggttgttgagcctaacatccaccagttgccgaaaaaactgaccgggctttgtactctggcgcagcttgacgaggcgctggcaacggcagacgtgctggtgatgctggtcgatcatagtcagttcaaagttatcaatggcgacaatgtccatcagcagtatgtcgtcgatgccaaaggagtctggcgctgatgagaaaaattctgataacaggtggtgccgggtttattggctcggcgctggtgcgttatatcatcaacgaaacgagcgacgcggtggtagtggtcgataagctgacctacgccggaaacctgatgtcgctggcaccggtcgcgcaaagcgagcgctttgcctttgagaaagttgatatctgcgatcgggcagaactggcacgcgtattcactgagcatcagccagactgtgtcatgcatctggcagccgaaagccatgttgaccgttctattgacggcccggcagcgtttattgaaaccaacattgtcgggacttatacattgcttgaagcggcgcgggcttactggaatgcgctgacggaagataaaaaatcagcgttccgttttcatcatatctccactgacgaagtatatggtgacctgcactcgacggatgatttcttcaccgaaaccacgccgtatgcgccgagcagcccttattccgcgtcaaaagccagcagcgaccatctggtgcgcgcctggctgcggacctatggtctgccgacgcttatcaccaactgctcgaataactacggcccttaccactttccggaaaaactgatcccgctgatgatcctcaacgcgctggcgggtaaatcgctgccggtatatggcaacgggcagcaaatccgtgactggctgtatgtggaagatcacgcccgcgcgctgtattgcgtggcgaccaccgggaaagtcggtgaaacctataatattggtggtcacaacgagcgtaagaatctcgatgttgtggaaaccatttgcgagctgctggaagaactggctccgaacaagccgcacggcgtggcgcactatcgtgacctgatcacctttgtcgctgaccgtccggggcatgatctgcgttatgccattgatgcttcgaaaattgcccgtgaacttggctggctgccgcaggaaacctttgaaagtggaatgcgtaaaacggttcagtggtatctggctaatgaaagctggtggaagcaggtgcaggacggcagctatcagggcgagcgtttaggtctgaaaggctaattttcagcggaggcaaacatgaaaggtattatcctggcgggcggttccggcacccgattgcatccgattacgcgcggcgtatcgaagcaactgttgccgatttacgataagccaatgatttactatccgctgtcggtgctgatgctggccggtatccgcgaaattctcatcatcactacgccggaagataaaggttatttccagcgcctgctgggcgatggtagtgagttcggtatccagctggaatatgccgaacagcccagcccggacggtctggcgcaggcctttatcatcggtgaaaccttccttaatggtgaaccttcttgtctggtgctgggcgataacatcttcttcggtcagggcttcagtccgaagctgcgtcatgttgcggcgcgcaccgaaggggcgacggtttttggctatcaggtgatggacccggaacgctttggcgtggtggagtttgacgacaatttccgcgctatctcgctggaagaaaagccaaaacagccgaagtcaaactgggcggtgaccgggctttatttctacgacagtaaagtcgtggagtacgcaaagcaggtgaagccgtcggagcgtggtgaactggagattacctccatcaaccagatgtacctcgaggcgggcaacctgaccgttgaactgctcgggcgcggatttgcctggctggataccggcactcacgacagcctgattgaagccagcacctttgtacagacggtggaaaaacgccagggctttaagattgcctgcctggaagagattgcctggcgtaacggctggctcgatgacgagggtgtgaagcgtgctgccagttcattagcgaaaactggctacggccaatatctgctggagttacttcgtgcccgtccgcgccagtattgagccactaacctgggaaaacgccttctttggtgttaacagcgccatcgtgcgcattacgtctgaagcaccgctcctgacgccagacgcgttagcgccgtggtcacgggtgcaggccaaaattgcggcatcaaatacgggtgaactggatgccctgcaacagctgggattctccctggtagaaggtgaagttgatttggcgctacccgtgaacaatgccagtgatagcggtgctgtagtggcacaagagaccgatattcccgcattacgtcagttagccagcgccgcatttgcgcaaagccgttttcgtgcgccgtggtatgcgcctgacgccagcagtcgcttttatgcacagtggattgaaaatgccgtgcgcggcacctttgatcatcaatgtctgattttacgtgcggcgtccggcgatattcgcggctatgtctctttacgggaactcaatgcgacagatgcgcgaattggcctgctggctggacgcggtgcaggtgctgagctgatgcaaacggcgctaaactgggcgtatgctcgcggtaaaacaactttgcgggtggcgacccaaatgggcaacaccgccgcgcttaaacgatacatacaaagtggtgcgaatgtagaaagcaccgcgtactggttatacaggtgatcacatgattccatttaacgcaccgccggtggtgggaaccgaactcgactatatgcagtcggcaatgggtagcggcaaactgtgtggcgatggcggttttacccgtcgctgccagcagtggctggagcaacgttttggcagcgccaaagtgttactgacgccgtcctgcaccgcttcgctggagatggcggcgctgctgctcgatatccagcctggcgatgaagtgatcatgccgagctacacctttgtctccaccgccaatgcctttgtgctgcgtggcgcaaaaatcgtttttgtggatgttcgcccggacaccatgaacatcgacgaaacgctgattgaagcggcgatcaccgacaaaacgcgcgttatcgtgccggtccattacgcgggtgtggcctgcgaaatggacaccattatggcgttggcgaaaaagcataatttgtttgtggtagaagatgccgctcagggcgtgatgtccacttacaaagggcgtgcactgggaaccattggtcatattggctgctttagcttccatgaaaccaaaaactacacggcgggcggtgaaggcggcgcgacgctgattaacgataaagcgttaatcgaacgagccgagatcatccgtgaaaagggcactaaccgcagccagttcttccgtggtcaggtcgataaatatacctggcgcgatattggctccagctatttgatgtccgatctgcaagctgcatacctgtgggcgcaactggaagcagcggatcgtatcaaccagcaacgtctggcgctgtggcaaaactactacgatgcgttagcgcctctggcgaaagccgggcgtatcgagctgccgtcgattcccgatggctgcgtgcagaacgcgcatatgttctacattaaactgcgggatattgatgaccggagcgcgttgattaactttctgaaagaagcggaaatcatggcggtgtttcattacattccgctgcacggttgccctgcgggggaacactttggtgagttccacggtgaagatcgctacaccaccaaagagagcgagcgcctgctgcgcctgccgctgttctacaacctgtcgcccgtcaatcagcgtacggtaattgcgactttgttgaactacttttcctgatatgtcgttggcaaaagcgtccttgtggacggcggccagtacactggtcaagattggtgccgggttactggtcggtaagttgctggcggtgtcatttggtccggcggggcttgggctggcggcaaatttccgccagttgattaccgtgctcggcgtgcttgccggggctggcatctttaacggtgtaaccaaatacgttgcccagtaccatgataatccgcaacagctgcgccgcgtggtcggcacttcatcagcgatggtacttggtttctctacgctgatggcgctggtttttgtgctggcagctgcgccaatcagccagggattgtttggtaataccgactatcaggggctggtgcgtttagtggcgctggtgcaaatggggatcgcctggggcaacctgttactggcgctgatgaaaggctttcgcgatgccgcaggtaatgcgttatcgctgattgtcggcagcttgattggcgttctcgcgtactacgtcagttaccgtttgggcggttatgaaggggcgttgctgggtctggcgctgattcccgcgctggtggtaattcctgccgccatcatgttgatcaaacgtggtgtcatcccgttaagctatctgaaacccagctgggataacggtctggcagggcagttgagcaaatttacgctcatggcgttgattacgtcggtgaccttgcctgttgcttacatcatgatgcgtaaactgctggcggcgcagtatagctgggatgaggtggggatctggcaaggggtgagcagtatttccgatgcctacctgcaatttattacggcatcgttcagcgtatatttgctgcccacgttgtcgcggctaacggaaaagcgcgatatcacccgggaagtggttaaatcgctgaaattcgtcttaccggcagtggcggcggcgagttttaccgtctggctgctgcgtgattttgctatctggctgctgttgtcgaataaatttaccgctatgcgcgatctctttgcctggcagttagtgggtgatgtgttaaaagtgggcgcttatgtctttggttatctggtgatcgccaaagcgtcactgcggttttatattctggcggaagtcagccagttcactttattgatggtatttgcccactggctaatccctgcgcatggtgcactgggcgcggcgcaggcatatatggcaacttatatcgtctatttttctctttgttgtggcgtgtttttactctggcgtaggcgggcatgactgtactgattcacgtactgggatcggatatccctcaccataaccgaaccgttttgcggtttttcaatgacgcgctggccgcgacgagcgagcacgcgcgcgagtttatggttgttggcaaggacgacggcttaagtgatagctgtccggcgctttctgtgcaatttttccctgggaaaaaatcgctggcggaagcggtcatcgcgaaagcaaaagctaaccgtcagcagcgttttttcttccacggtcagttcaatcccacactgtggctggctctgctgagtggtggcattaagcccagccagtttttctggcatatctggggggcagacctgtatgagctttccagtggcttgagatataagcttttttacccactacgtcgcctggcgcaaaagcgagtcggctgtgtatttgccacccgcggcgatttgagcttttttgccaaaacgcacccaaaggtgcggggcgaactgctgttcttcccgacgcggatggacccttcgctcaatacgatggcgaacgatcggcaacgtgaagggaaaatgaccattctggtggggaactccggcgaccgcagcaatgagcatattgctgccttgcgcgccgttcatcagcaatttggcgatacggtaaaagtggtggtgccgatgggatatccgcctaataacgaagcgtacattgaggaagttcgtcaggcggggctggagttattcagcgaagaaaatctacaaattctgagcgaaaaactggaatttgacgcctatctggcgctacttcgtcagtgcgatcttggttactttatttttgcccgccagcagggcattggtacgctgtgcttactgattcaggcgggcattccttgtgtgcttaaccgggaaaatccgttctggcaggatatgacggaacaacatttgccggtgctgtttactaccgacgatctcaacgaggatattgtgcgtgaagcgcagcgccagttggcgtcggtggataaaaacaccattgccttctttagccctaactatctacaaggctggcagcgggcgttggcgattgccgccagggaggtcgcatgagtctgctgcaattcagtggcctgtttgttgtctggctgctctgcacgctgtttattgccacgctgacctggtttgagtttcgccgtgtgcgctttaacttcaatgtcttcttttcattgctgtttttgctcacctttttcttcggcttcccgctgaccagcgtgctggtatttcgctttgatgttggtgtcgcgccgccagaaatcttgttgcaggcgttgctttctgcgggctgcttctacgcggtttactatgtcacctacaaaacccgcctacgcaaacgcgttgctgatgtaccgcgccgtccgctgtttaccatgaaccgcgtggagaccaatcttacgtgggtgatcctgatgggtatcgcgctggtaagcgtcggcatcttcttcatgcacaacggctttttgctgttccggcttaactcctacagtcagatcttttccagtgaagtctccggcgtggcgttaaaacgcttcttttactttttcatcccggcgatgctggtggtctactttctgcgccaggacagcaaagcgtggctgtttttcctcgtcagcacggtcgcctttggcttgctgacttatatgattgtcggcggcactcgcgccaatatcatcatcgcattcgctatcttcctgtttattggcattattcgcggctggatttcgttgtggatgctggcggcggcgggcgtgctggggattgttggcatgttctggctggcactaaaacgctatggaatgaatgtgagcggcgatgaagcgttctatacgtttctctatctcactcgcgacaccttctcgccgtgggagaatctggcgttgctgttgcagaactacgacaacatcgacttccagggcctggctccaattgtccgcgatttctatgtctttatcccttcctggctgtggccgggtcgcccgagtatggtgctgaactcagccaactactttacctgggaagtgctgaataaccactccggactggcgatctcgcctacgcttataggctcactggtggtgatgggcggcgcgttgttcatcccgctcggggcgatcgtggttggtctgatcatcaaatggttcgactggctgtatgagctgggcaaccgcgagcctaatcgctataaagctgcgatattgcacagtttctgctttggggcgatcttcaatatgatcgtgctggcgcgtgaagggctggattcgtttgtctcacgcgtggtcttttttatcgtggtcttcggcgcatgtctgatgatcgcaaaactgttgtactggctttttgaaagcgccggactcattcataaacgtacaaaatcatcgctccggacgcaggttgaaggataacaatgaataacaacaccacggcaccaacctatacgctgcgtggcttacagttgattggttggcgtgatatgcagcacgccctcgattatctgtttgctgacgggcagcttaagcagggaacgctggttgccattaatgctgaaaaaatgctgactattgaagataacgccgaggtcagggagttaattaacgctgccgaatttaaatatgcggatggcatcagcgttgtacgttcagtacgtaaaaagtacccgcaggcgcaggtttcccgcgttgccggtgccgatctctgggaagagctgatggcgcgcgcaggcaaagaagggacgccggtatttcttgtgggcggtaaacctgaagtgctggcgcaaactgaagctaaactgcgcaaccagtggaatgtgaatatcgttggcagtcaggatggttattttaaacccgagcagcgtcaggcgctgtttgaacgcattcatgccagcggtgcgcaaatcgtcaccgttgcgatgggatcgccaaagcaggagatcatcatgcgcgactgccgtctggtacatccagatgcgctgtatatgggcgttggcgggacttacgatgttttcaccggtcacgtaaaacgcgcaccgaaaatctggcaaacgctggggctggagtggctctaccgcctgctttcgcagccgagccgcattaagcgtcagcttcgtttgctgcgttatttacgctggcactacaccggcaacctatgattttcctctctttgtaaagcgacggagtggtcactccgtcgcctgtctgcttttttattacacaaagcattcaaatttttaatgctttatttgccatttctcctgaattacgaaaacatttgcaacactcgatgtacccataacgataaccggtaacaccggaaagcatgcaaacacaacacgaggatttatggcagataacaaaccagagctacagcgtgggctggaagctcgacatatcgaactcatcgccctggggggcaccattggcgtcggcctgtttatgggggccgccagtaccctgaaatgggccgggccatccgtattgttggcctatatcatcgccgggctgttcgtctttttcatcatgcgttcaatgggcgaaatgttgttcctcgaaccggttaccggttcgttcgccgtttatgcgcatcgttatatgagcccgttctttggctatctcaccgcctggtcttactggtttatgtggatggcggtggggatctctgaaatcaccgccattggcgtttatgtccagttctggttcccggagatggcgcagtggatacccgcattgatcgcagtggcgctggtggcgttggcgaatctggcggcggtgcggttgtacggcgaaatcgagttctggttcgcgatgatcaaagtcaccacgattatcgtgatgattgtcattggcctgggcgtgattttctttggctttggcaatggcgggcagtcgattggttttagcaatctcacagagcatggcggtttctttgcgggtggctggaaagggttcctgaccgctctgtgtattgtggtggcgtcctaccagggcgtggagctgattggcattactgccggtgaagcgaagaatccgcaggtgacgctgcgcagtgccgtaggcaaggtgctgtggcggatcctgattttctacgtaggcgcgattttcgttatcgtcaccatcttcccgtggaatgaaataggcagcaacggcagcccgttcgtactgacttttgccaaaatcggtattaccgcagcggcgggcattatcaactttgtggtgctgacggctgcgctctctggctgtaacagcggcatgtacagttgcggacgtatgctctacgcactggcgaaaaaccgtcagttaccggcggcaatggcgaaagtttcccgtcacggcgtaccggttgcgggtgtggcagtatctattgctattctgctaattggctcatgcctgaactacatcattcccaatccgcagcgtgtgtttgtctacgtctacagtgccagcgtgcttccggggatggtgccatggtttgtgatattgataagccagctgcgttttcggcgtgcacataaagcggcgattgccagccatccgttccgctcaatcctgttcccgtgggccaattacgtaacaatggcattcctgatttgcgttttgatcggcatgtactttaatgaagatacgcgtatgtcgctgtttgttggcatcatctttatgctggcggtgacggcgatttataaagtttttggccttaatcgccacgggaaagcgcataaactggaggaataagcagcaaaacgcacaaaccgtaaccaaacgcgcaatttatttaaaaagggactagacagaggggtgggaagtccgtattatccacccccgcaacggcgctaagcgcccgtagctcagctggatagagcgctgccctccggaggcagaggtctcaggttcgaatcctgtcgggcgcgccatttagtcccggcgcttgagctgcggtggtagtaataccgcgtaacaagatttgtagtggtggctatagctcagttggtagagccctggattgtgattccagttgtcgtgggttcgaatcccattagccaccccattattagaagttgtgacaatgcgaaggtggcggaattggtagacgcgctagcttcaggtgttagtgtccttacggacgtgggggttcaagtcccccccctcgcaccacgactttaaagaattgaactaaaaattcaaaaagcagtatttcggcgagtagcgcagcttggtagcgcaactggtttgggaccagtgggtcggaggttcgaatcctctctcgccgaccaattttgaaccccgcttcggcggggttttttgttttctgtgcatttcgtcaccctcccttcgcaataaacgcccgtaataactcattgccccacggtatgatttcgcccttaacgtattgaaggatgacttcaggcaaggagcgaccatgctgcaacaggttccaacgcgtgcttttcatgtgatggcgaaaccgagcggttccgattgtaatctgaactgtgactactgtttttatctcgaaaaacaatccctttaccgcgaaaagccagtcacgcatatggacgatgacacgctggaagcgtatgtccgtcactatatcgctgccagcgaaccgcaaaacgaagtggcttttacctggcagggcggcgaaccaacgctactcgggctggcgttttaccgccgtgccgtagcgctacaggcgaaatatggtgctggcaggaagataagtaacagcttccagactaacggcgtgctgctggatgacgaatggtgcgcgtttctcgcggagcatcattttcttgttggtttatcgctggatggcccgcctgagatccacaatcaatatcgcgtgactaaaggtggcagacccacgcataagctggtgatgcgtgccctgacgctcctgcaaaaacatcatgtcgactataacgtgctggtctgcgttaatcgcaccagcgcgcagcaaccgttgcaggtatatgattttttgtgcgatgcgggagtcgaattcatccagtttattccggtggtcgagcgcctggctgatgaaacaactgcccgcgatggacttaagttacatgcgcctggtgatattcagggtgagctaacggaatggtcggtgcgccccgaggagttcggtgagtttctggtggcgatattcgaccactggatcaaacgcgacgtcggcaagattttcgtgatgaatatcgaatgggcgtttgccaattttgtcggtgcgccgggtgcggtttgccatcatcagccaacctgtgggcgctcggtgattgttgagcacaacggcgacgtttacgcctgtgatcactatgtttatccgcaatatcggctggggaatatgcaccagcaaacaattgcagaaatgatcgattccccgcaacagcaggcgtttggtgaagataaatttaagcagttaccggcgcagtgtcgcagttgtaacgtgttaaaagcgtgctggggaggctgcccgaaacaccgcttcatgctcgatgccagcggcaaaccgggactgaattatttgtgtgccgggtatcagcgttatttccgccatctaccgccatatcttaaagcaatggctgatttgctggcgcacggtcgcccggccagcgacattatgcatgcgcatttgctggtggtgagtaagtagaaatcggcggccgcctgcggttgattgccggatgcggcgtaaacgccttatccggcctacatgatcgtgcaaattcaataaattgcagcgttctgtaggctggataagatgcgtcagcatcgcatccggcaaaggcagatctcagcgatagcgccggcttagtcagatttaatctgcgcgcgtggtggatattttttcaggatctccatatacgcgtgcatttcggtctgtagcggtacacccatcggaatatggcgcacgccgatggagtcgctttcctgcggatcggtgtagaggttaaacaccgacgatcccgccgtttgcattactgtgccggtgaatccaccctgatatccgctctgggtataagcgtaaggttgctgaatcaggacgtgatacttgaactcatccatacgcacagcagcgagtttaccgttgaggaagtagtgctcggccttacggttagactgaccatttgttcccaggaagaaggatgtctggtccacaccatcgataaaggtggttttcggcactaaattcgccactttcgctccaggatgccctgccagatccagcgcggtagggaagagatctgccagatcgacaataccgtcagatttacgcggttggatcatccctttccagtaaacgaaagtcggtacgcgaacgccgccttcccaggtcgaacctttcgcaccacggaacggggtgcgtccgtgcggcggtacttcggcttccggtccgttatcggaggtaaagacgatcagcgtgttatcaagctgaccgtttttctccagtgttttatacagattagcgaacacatcgttcatctccaccatgcagtcgccatacgaggtgcgtgccggagagctacccgcatatttcgcatttgggtagttatcgaagtggcagccacgagtgccgtagtagaggaagaatggtttatcgctcttcgccatcttgtcgaggaacttaacgccatagtccatccagcgttgatccagatcttccatatatttcggcgtaatgtcggcaatggcctgttgttcgccgccgcgcaccgcatgaacgtcatctttgctgaacggtaattgcttgatgtattcagaacggtccggactcagggccacttccggattgacgtgaacgtcgcgccattcggtgtacatatcagacaccgagttaaagccacggaaatcatcaaagccaacgttctgcggctgcgactctttgttttcccccatatgccattttccgatggcctgagtgacgtagccctgatcgtgcagcaactgcggcagcgtggttaacccttgcagcccgcccggttgcccgtacattggcggcatcagaatgccgtggtggatggagtattgtccggtgagaatggtggcgcgggttggggaagagcttggttgagaatacgccgaagttaaaatcagcccctggctggcaacggcgtcgatatctggtgtagggttacccaccgccacgccgccaccgttaaaaccgacgtccatccagcccacatcgtccagcaagaaaacaaccacattcggtttcttaccggtttttttctcaagttctgccagcttctgctgggtttctttatcctgcgccggatgctgcattactggcatcatattgtcggcaatagtggtcgccggtttaaccagatactggtttgggtgatcgtatccggcaaagcctttgcgtgcggtggcagttgacggggtatctgctgcgctggccatgagaggaagagcggcggcgacagcaacaacaagacgtttgggtgaaaacgaaaattccatgcaaaatgctccggtttcatgtcatcaaaatgatgacgtaattaagcattgataattgagatccctctccctgacaggatgattacataaataatagtgacaaaaataaattatttatttatccagaaaatgaattggaaaatcaggagagcgttttcaatcctacctctggcgcagttgatatgtaaggcaggtttattatatcgcgttgattattgatgctgtttttagttttaacggcaattaatatatgtgttattaattgaatgaattttatcattcataataagtatgtgtaggatcaagctcaggttaaatattcactcaggaagttattactcaggaagcaaagaggattacagaattatctcataacaagtgttaagggatgttatttcccgattctctgtggcataataaacgagtagatgctcattccatctcttatgttcgccttagtgcctcataaactccggaatgacgcagagccgtttacggtgcttatcgtccactgacagatgtcgcttatgcctcatcagacaccatggacacaacgttgagtgaagcacccacttgttgtcatacagacctgttttaacgcctgctccgtaataagagcaggcgtttttttatgtatcaggaaggccccggaggtgcttgcctccgggtgagaaggaactactgtggcgggttattctgcaacgttaacatcaaaccgtcgcgacgcatagctgcagcttcttccggcttgtgcagtctgtccagcgcgtcggcaagccatgcgtaatcgtaggcgtccggacgttgtttcagcgctgcgcggaaggcgagcgatgcttcctgccattctccgtgcttcatcagtgactggcccagtgtgctccacaacagcgggcgatcgccgacgtttttgatttgctggcgcagcactttttccagctgttccggattgtttgttttcagtcgaggaatcggcagcagtaggcgatcgtcgtactggcgtttcaggccatcgatgataatttgctgggcagtatcatgatcgtcacattcaataagatgttccgccattgccacctgcaacgctacctgatgacgcgttttccggctttggtttttccaccagttacgcaaaccttcgctaccgttatcggcacgcgcctgatccatcaggccaatccatgcctgttgttccagcattgcacgatgttcttcatcaccaacatgggctttcgccattgatgggataatatccagcagcgaactccatgcacctgtgcggatatacgcctgttccgccagacgtaatacttccggatggcgtggcgtaacttccagcagcttatccacgccgtggcgtgcagcatggttttcattacgggccagttgcagacgtacgcgggtgatttctaccggaatggtgtcgttgccggccagctccgctgcgcgttccagatgttggttggcgcgtgcttcatcaccacgttgttgcgcggcttcggcagccagtagatagttcaccaccggttgttccgcgtgatcggcatttttcgccatcagcttttcaacttgctgataatcgccttccgccagtttcagcagcgcctgttcggtctgcttacgtgcacggcgacgcttacgtccgacaaaccacccacgggtgtgcgcgccagtgcggaagatccgccgcagtagccactcaatggcaaacagcactaccatcgccagaatcaatatgatcgccaggcccgtgacgctggtttcgatattgtagttgtcggtctggatcagcacataaccctgatggccggcaatcatcgggccaaccacgatccccgcaatcagcaacacaaagagcaataacacttttagcatggttattctccttgcggcgcggctgccggagtatcagcttgcggtgcaggtgcaggtttagcttccgttgtccccgctgccggttgtgccagcaggttacgcacgcgagtctgcatcagtttttccagcatcgcctggctttgcagggtttccggaagatccatcgagatattttgctggcttaactggtccacctcgtcgaggaacgctttggtggtggcatcatcagtattgtagtaagcacgtacccaggtggagacgttctccagcgcctggcgataagtctcttcctggtgacgcggtacagcttgtgctgcgaccagcaggcgagagcgaatattttcgcgcagatagatatcctgatttggcgctaacagcggtacggcggtgtcatcacgacggcgaatcgtaatgaagttgtccataaagttctgccagcttttttgcagattgatacgccattcgctgatggaactggaaagctcttcaccgtctgaatccatcggcgaaccatcgctgtcattatcggccagacgcaggttatctacctgatttgaaagctgattaagcttaaggatgatgccgtcataatccacctgcgatactgcagaaaggctggcgatatcatcggtaattgcccgacgaacggtaatcagactcgggtcattcatatccgccaggctggcgtctgcacttttcagcaacgctgcagcggtcgtgacgtcctgatcgctccacagcttccgtccggcgagtttcaccagaaaatcggcctgagccagcagccaggttttagcatcgctgccggaaatggtggcgaccttttgttggacttcatccaactgttttgccagcgtttcttgctgacgattcgcctgcttaagttgtgcagcttgttgcttaataatgccttccagctcggctttttggctctcctgggctttttgcaatgccgtcagttggttagccagggcatcgctggtggcggtctgattgacggcctgttgtttaccccagccatacaaaccgatgcccgccgccagagcaatagcgatagccaccgcgctgagaatcaatgcggtattgttcttactctttttttctgttgcgacaggttgtgacgtggtgtccacggcctccctggtctcttcaaccacggcggaggttttttcttgttccgtcattatggcttcctgttatgagagttattgtaatgcccgtaaaagcgcatcgttgtcagcgttatcggcgaccttaatgtcttgccagcccagttcccgggcgagtttcgccaaacgctcactgacgaccaatagtcgacagtgtagtaaccagtgctcacgataccattgtgggatcagcgaccagagttgctgcaacatttcaccgctggtaacaacgaccatcgtcacctcgcgggcttgccagcgcatcgcttcttctgcaccatcgtaatggattgcgcatcgttgataacattcacaaaaagtgacctcagcaccgcgcgccgtcagggtatccccaattagctcacgaccaccattgccacgtaatatcagcgcacgtttgcccgcaatattttgtaattcaggtaattgtagcaagacttcgctgatttcccgatcctgcgggtagagaatcttctgtccacttacggtatgtagtgccagtgcggtggtgcgtccaatggcgaaataatcaggtagtcggggccatttacgatcttgctgatgcagctgtgattgggcaaaagcaaccgcgtgttgcgagagggcaaacaacagatcgctctcccccagcgctgccagttgatcagcaagttgcggtaattgttgacccggagaaaactcaatcagcggaaaatgccaggccacctgccccagtgtgcgcagacggctcactaactcttctccagcgggagacgggcgggtgacaaggatactcatgccggggcgtctccgttatagacttcagcgaggatctcgcgcgcgccgttattcagtagctcttctgccagcgaaatccccatttgttcggcatcttgcggcgcaccgcggcgttcaccgcgaataatctgcgaaccgtccggcgcgccgaccagcgcacgcagccagatttcgccatcaataagctcggcgtagctaccaattggcacctgacatccgccttcgagacgggtattcatggcgcgttctgcggtaacgcgcagtgcagtttcgtggtgattcagcgcggcaagcagctcgcgagtgcgtgaatcatcaaggcggcattcaatacccaccgcaccttgtcctaccgccggaagagaaatctcgggtggcaacgcggcgcgaatacgtgactccagacctaaacgttttagtccggctacggcaagaatgatggcatcgtattcgccgttatccagtttgctcaggcgagtgccgacgttgccgcgcagggagcggataatcagatccggacggcgttcagccagttggcactggcgacgtaaactggacgtcccgacgatactgcctgccggtaacgcatccagactgtcatagttattggacacaaaggcatcgcgaggatcttcacgctcacaaatagtgaccagtcccagaccttgcgggaattcaaccggcacatctttcattgagtgtacggcgatatcggcgcgattttcgaggagcgcgacttccagctcttttacaaataagccttttccgcctactttcgccagcggcgtatcaagaatcacatcgccgcgcgtcaccatcggtaccagttcaacgaccaggcccggatggctcgccatcaacttgtctttgacatagtgtgcctgccagagtgcaagtgggctttggcgtgtggcaattcttaaaacattgtctaacatgcttgttaccgtcattatcatccgtggtccatcctaacatccttgccagagtgatgtcagtgttgtggtgaaacgtagacgcctgcgcaaaccgtaaaatgaggtctggcagtggatcctgacaggcgtttcacgccgttgtaataaggaatttacagagaataaacggtgctacacttgtatgtagcgcatctttctttacggtcaatcagcaaggtgttaaattgatcacgttttagaccattttttcgtcgtgaaactaaaaaaaccaggcgcgaaaagtggtaacggttacctttgacatacgaaatatcccgaatgccgcgtgttaccgttgatgttggcggaatcacagtcatgacgggtagcaaatcaggcgatacgtcttgtacctctatattgagactctgaaacagagactggatgccataaatcaattgcgtgtggatcgcgcgcttgctgctatggggcctgcattccaacaggtctacagtctactgccgacattgttgcactatcaccatccgctaatgccgggttaccttgatggtaacgttcccaaaggcatttgcctttacacgcctgatgaaactcaacgccactacctgaacgagcttgaactgtatcgtggaatgtcagtacaggatccgccgaaaggtgagcttccaattactggtgtatacaccatgggcagcacctcgtccgtagggcaaagttgttcctctgacctggatatctgggtctgtcatcaatcctggctcgatagcgaagagcgccaattgctacaacgtaaatgtagcctgctggaaaactgggccgcctcgctgggtgtggaagtcagcttcttcctgattgatgaaaaccgcttccgtcataatgaaagcggcagcctggggggcgaagattgtggctccacccagcatatactgctgcttgacgaattttatcgtaccgccgtgcgtctcgccggtaagcgtattctgtggaatatggtgccgtgcgacgaagaagagcattacgacgactatgtgatgacgctttacgcgcagggcgtgctgacgccaaatgaatggctggatctcggtggcttaagctcgctttctgctgaagagtactttggtgccagcctttggcagctctacaagagtatcgattccccatacaaagcggtactgaaaacactgctgctggaagcctattcctgggaatacccgaacccacgtctgctggcgaaagatatcaaacagcgtttgcacgacggcgagattgtatcgtttggtctcgatccatactgcatgatgctggagcgtgttactgaatacctgacggcgattgaagattttacccgtctggatttagtacgtcgctgcttctatttaaaagtgtgcgaaaagctcagccgtgaacgcgcctgcgtaggctggcgtcgcgcagtgttgagccagttagtgagcgagtggggttgggacgaagctcgtctggcaatgctcgataaccgcgctaactggaagattgatcaggtgcgtgaggcgcacaacgagttgctcgacgcgatgatgcagagctaccgtaatctgatccgctttgcgcgtcgcaataaccttagcgtctccgccagtccgcaggatatcggcgtgctgacgcgtaagctgtatgccgcgtttgaagcattaccaggtaaagtgacgctggtaaacccgcagatttcacccgatctctcggaaccgaatctgacctttatttatgtgccgccgggccgggctaaccgttcaggttggtatctgtataaccgcgcgccaaatattgagtcgatcatcagccatcagccgctggaatataaccgttacctgaataaactggtggcgtgggcatggtttaacggcctgctgacctcgcgcacccgtttgtatattaaaggtaacggcattgtcgatttgcctaagttgcaggagatggtcgccgacgtgtcgcaccatttcccgctgcgcttacctgcaccgacaccgaaggcgctctacagcccgtgtgagatccgccatctggcgattatcgttaacctggaatatgacccgacagcggcgttccgcaatcaggtggtgcatttcgatttccgtaagctggatgtcttcagctttggcgagaatcaaaattgcctggtaggtagcgttgacctgctgtaccgcaactcgtggaacgaagtgcgtacgctgcacttcaacggcgagcaatcgatgatcgaagccctgaaaactattctcggcaaaatgcatcaggacgccgcaccgccagatagcgtggaagtcttctgttatagccagcatctgcgcggcttaattcgtactcgcgtgcagcaactggtttctgagtgtattgaattgcgtctttccagcacccgccaggaaaccgggcgtttcaaggcgctgcgcgtttctggtcaaacctgggggttgttcttcgaacgcctgaatgtatcggtacagaaactggaaaacgccatcgagttttatggcgcgatttcgcataacaaactgcacggcctgtcagtgcaggttgaaaccaatcacgtcaaattaccggcggtggtggacggctttgccagcgaagggatcatccagttctttttcgaagaaacgcaagacgagaatggctttaatatctacattctcgacgaaagcaaccgggttgaggtatatcaccactgcgaaggcagcaaagaggagctggtacgtgacgtcagtcgcttctactcgtcatcgcatgaccgctttacctacggctcaagcttcatcaacttcaacctgccgcagttctatcagattgtgaaggttgatggtcgtgaacaggtgattccgttccgcacaaaatctatcggtaacatgccgcctgccaatcaggatcacgatacgccgctattacagcaatatttttcgtgatgaacgtgccggaaagcgaggcttatccggcatgcaatcttagcggaaactgactgtttcacccgcctgctgcgtcgccgcctgttccagcaaatcccagaaggtttcgccgctgcgatcacaaatccactcatcgcctttcaggtcaaaatggtagccgccctgtttggttgccagccatacctggtgcagcggctcctggcggttgataatgattttgctgccattctcaaaggtaatggtcagtacgccgccgttgatttcgcagtcgatatcgctgtcgccatcccagtcgtccaggcgttcttcaatggtcagccagagttgatcagccaggcgatgaaattcactgtcgttcattgttgtatcctgtttttaagtgatggcggcagtatagcggcatggggtcagggcttcaaagtttgcacctctgcggctgcgttccggcacgattcatccgtcaccggaataatgatgtctctgtgtagcgaaagatttgtctcttcattagggcgcagttacaccacgtctttccctgtttctggtaaacattatgatcaggtttaccgagcgagcatcctcacgctgacggaactaaaaaagacaacaaacaaaccacattgcgatagtgcataaagccatcctggcgcgaggtgccgatcacgaaactaccagcaaaacataaatccccacgagtaagcgttatactcgcagcatttcctcacttttcagacttcataaagagtcgctaaacgcttgcttttacgtcttctcctgcgatgatagaaagcagaaagcgatgaactttacaggcaatccataatgaaaaacgtgtttaaggcactcactgtattacttactctcttcagcctgacgggctgcggtctgaaaggtccgctctatttcccgcctgcagataaaaacgcaccgccgccgaccaaaccggtagagacgcaaacgcaatccacggtgccggataaaaacgatcgcgccactggcgatggtccatcccaggtgaattactaaaagtcagtttctgtacccgcgtgattggagtaaatgatgcagttctcgaaaatgcatggccttggcaacgattttatggtcgtcgacgcggtaacgcagaatgtctttttttcaccggagctgattcgtcgcctggctgatcggcacctgggggtagggtttgaccaactgctggtggttgagccgccgtatgatcctgaactggattttcactatcgcattttcaatgctgatggcagtgaagtggcgcagtgcggcaacggtgcgcgctgctttgcccgttttgtgcgtctgaaaggactgaccaataagcgtgatatccgcgtcagcaccgccaacgggcggatggttctgaccgtcaccgatgatgatctggtccgcgtaaatatgggcgaacccaacttcgaaccttccgccgtgccgtttcgcgctaacaaagcggaaaagacctatattatgcgcgccgccgagcagacaatcttatgcggcgtggtgtcgatgggaaatccgcattgcgtgattcaggtcgatgatgtcgataccgcggcggtagaaacgcttggtcctgttctggaaagccacgagcgttttccggagcgcgccaatatcggttttatgcaagtggttaagcgcgagcatattcgtttacgcgtttatgagcgtggggcaggagaaacccaggcctgcggcagcggcgcgtgtgcggcggttgcagtagggattcagcaaggtttgctggccgaagaagtacgcgtggaactccccggcggtcgtcttgatatcgcctggaaaggtccgggtcacccgttatatatgactggcccggcggtacatgtctacgacggatttattcatctatgaagcaaccaggggaagaactgcaggaaacactcacggagcttgatgaccgggcggttgtcgattatctgattaaaaatcctgagttttttatccgtaatgcgcgcgcagtagaagcgatacgtgtgccgcatccggtacgcggcaccgtttcgttggtcgagtggcacatggcccgcgcacgtaatcatattcatgttctggaagagaacatggcgctgttgatggaacaggctatcgccaacgaaggcctgttttatcgcctactctacctgcagcgcagtctcaccgccgccagcagtctcgacgatatgctgatgcgctttcaccgctgggcgcgcgatctcggcctggcaggtgcgagtctgcgcctgtttccggatcgctggcgcttaggtgcgccgtcgaaccacactcatctggcattaagccgtcagtctttcgaaccgctgcgtattcagcgttaggggcaggaacagcactatcttgggccgcttaacggaccagagctgctggtggtgctaccggaagcgaaagcggtgggatcggtggcgatgtcgatgctgggaagcgatgctgatttgggtgtcgtgctgtttaccagtcgcgatgccagtcactatcaacaagggcaaggaacgcagttacttcatgaaattgcgctgatgttgccggagcttctggagcgttggattgaacgcgtatgaccgatttacacaccgatgtagaacgctacctacgttatctgagcgtggagcgccagcttagcccgataaccctgcttaactaccagcgtcagcttgaggcgatcatcaattttgccagcgaaaacggcctgcaaagctggcagcaatgtgatgtgacgatggtgcgcaattttgctgtacgcagtcgccgtaaagggctgggagcagcaagtctggcgttacggctttctgcgctacgtagcttttttgactggctggtcagccagaacgaactcaaagctaacccggcgaaaggtgtttcggcaccgaaagcgccgcgtcatctgccgaaaaacatcgacgtcgacgatatgaatcggctgctggatattgatatcaatgatcccctcgctgtacgcgaccgtgcaatgctggaagtgatgtacggcgcgggtctgcgtctttctgagctggtggggctggatattaaacacctcgacctggagtctggtgaagtgtgggttatggggaaaggcagcaaagagcgccgcctgccgattggtcgcaacgctgtggcgtggattgagcactggcttgatttgcgcgacctgtttggtagcgaagacgacgcgctttttctgtcgaaactgggcaagcgtatctccgcgcgtaatgtgcagaaacgctttgccgaatggggcataaaacaagggctgaataatcacgttcatccgcataaattacgtcactcgttcgccacgcatatgctggagtcgagcggcgatcttcgtggtgtgcaggagctgctgggtcatgccaacctctccaccacgcaaatctatactcatcttgattttcaacaccttgcctcggtgtacgatgcggcgcatccacgcgccaaacgggggaaataatgcgtttttaccggcctttggggcgcatctcggcgctcacctttgacctggatgataccctttacgataaccgtccggtgattttgcgcaccgagcgagaggcgcttacctttgtgcaaaattatcatccggcgctgcgcagcttccagaatgaagatctgcaacgcctgcgccaggcggtacgggaagcggaacccgagatttatcacgacgtgacgcgctggcgttttcgttcgattgaacaagcgatgctcgacgccgggctgagtgccgaagaagccagtgcaggcgcacacgcagcaatgatcaactttgccaaatggcgcagccgaatcgacgtcccgcagcaaactcacgacaccttaaaacagctggcgaagaaatggccgctggtggcgatcaccaacggtaacgcccagccggagctgtttggtttgggggattattttgagtttgtgctgcgcgctggcccgcacgggcgctcaaaaccgttcagcgatatgtactttttggctgcggaaaaactcaacgtgccgatcggcgagatcttacatgttggggacgatctcaccactgacgtgggtggggcaattcgcagcggaatgcaggcttgttggatcagaccggaaaatggcgatctgatgcaaacctgggacagccgtttactgccgcatctggaaatttcccggttggcatctctgacctcgctgatataatcagcaaatctgtatatatacccagctttttggcggagggcgttgcgcttctccgcccaacctatttttacgcggcggtgccaatggacgtttcttacctgctcgacagccttaatgacaaacagcgcgaagcggtggccgcgccacgcagcaaccttctggtgctggcgggcgcgggcagtggtaagacgcgcgtactggtgcatcgtatcgcctggttgatgagcgtggaaaactgctcgccatactcgattatggcggtgacgtttaccaacaaagcggcggcggagatgcgtcatcgtatcgggcaactgatgggcacgagccagggcggtatgtgggtcggcaccttccacgggctggcgcaccgtttgctgcgtgcgcaccatatggacgccaatctgccgcaggatttccagatcctcgacagtgaagaccagctacgcctgcttaagcgtctgatcaaagccatgaacctcgacgagaagcagtggccgccgcggcaggcaatgtggtacatcaacagccagaaagatgaaggcctgcgtccgcatcatattcaaagctacggtaatccggtggagcagacctggcagaaggtgtatcaggcgtatcaggaagcgtgtgaccgcgcgggcctggtggacttcgccgagctgctgctgcgcgctcacgagttgtggcttaacaagccgcatatcctgcaacactaccgcgaacgttttaccaatatcctggtggacgaattccaggataccaacaacattcagtacgcgtggatccgcctgctggcgggcgacaccggcaaagtgatgatcgtcggtgatgacgaccagtcaatctacggctggcgcggggcgcaggtggagaatattcagcgtttccttaatgatttccccggtgccgaaactattcgtctggagcaaaactaccgctctaccagcaatattctgagcgccgctaacgccctgattgaaaacaataacgggcgtctgggtaaaaaactgtggaccgatggcgcggacggtgagcctatttccctctattgcgcttttaacgaactcgatgaagcgcgttttgtggttaaccgcatcaaaacctggcaggacaacggcggagcgcttgccgagtgcgccattctctaccgcagcaacgcccagtcgcgggtgctcgaagaggcgttattgcaggccagtatgccgtaccgtatttacggcgggatgcgcttcttcgaacgccaggaaatcaaagatgcgctctcgtatctgcgcctgattgccaaccgcaacgacgacgcggcctttgagcgtgtggtgaatacgccaacgcggggtattggtgaccggacgctggacgtggtacgtcagacatcgcgcgatcgccagttaacactctggcaggcatgtcgtgagctgttgcaggaaaaagccctcgccgggcgagctgccagcgccttgcagcgatttatggaattaatcgacgccttagcgcaggaaactgccgatatgccgctgcatgtacagactgaccgggtaattaaagactccggcctgcgtaccatgtatgagcaggagaagggcgaaaaaggtcagacgcgtatcgaaaacttagaggaactggtgacggcaacgcgccagttcagctacaacgaagaagacgaagatttaatgccgctgcaggcgttcctctcccatgcggcactggaagcaggtgaagggcaggcggatacctggcaggatgcggtgcagttgatgacgctacactcggcgaaaggcctggagttcccgcaggtgtttatcgttggtatggaagagggcatgttcccaagccagatgtcgctggatgaaggcgggcgtctggaagaagaacgccgtctggcctacgttggcgtaacccgcgcgatgcagaaactgacgctgacctacgcggaaacccgccgtctgtatggtaaagaggtttaccatcgcccgtcgcgctttatcggcgagctgccggaagagtgtgtggaagaggtgcgcctgcgcgccacggtaagccgcccggtcagccatcagcggatgggtacgccgatggtcgagaacgacagcggctacaagctcggccagcgcgtacgccacgctaagtttggtgaaggcaccattgtcaatatggaaggcagcggtgagcatagccgtttgcaggtggcatttcagggccagggtattaaatggctggtggcggcatacgcccggctggagtcggtgtaacgttgccggatgcggtgctgcgcaccttatttggcctaaaaaatcattcagattcaataaattgcaacgtcatgtaggccggatagggcgtttacgccgcatccggcatctgcgccatcttcagtatctgacacaaaactatcgttttaacctttccgctcgacggaaatcatggtgacaaaaggatagcgttgccacgggattgccccgcctttcatatacatatgtgaaatcgtgccatcaagataaagcagctgctcaacgttcagtttcgctttggcataacaggcaaaatcataaaaatttgttgcctgctggctcaacaaaaacacggcgttcccatgtttattaatcccaacaccgttacgaattttgcttgaggcgacgttgggatgaatacgcggattaattacaccgttttccatcaacattggccctgactgcaccgcaaactgaatctctttactggttttgaaggcatccagacgaacgatgccgactttatctcccgcgacataaaacacgccgccaggacggataaagaaattcccttcacctgaagcgagatttaacgccaccttctgctgaccgttttcgatgtacaaaccgagcggcgcatagctttcatcatagatgccgccgttcatcgccatctgcacctgaccctgactattaatatccgccagcagagcatgtaacgttccccacgcttcgccattggctttttgccagtacattttcacccgctctgtttgaggattaacggtatacgcctgtacggtcagcgtcggatctgagagtgcgcaatcatcagcggcaacagcaaacaagggaagtaaggtgagggcgagaaaaatccgtttgagattcaaggtgatcattcctttaccaatgagtagctgatgcgccattataggtcctggatgtgggatttttttatcctgttagcgaccttgacgagtaccaaaaagcgcgaagttcaactattgttctgtggtgttctgttgcgtgttgacggcaaaattttgctggcgtaacatgcgcgcacgatcactctaagaggacattcgccttggacacacccagtagatactggctcactatcctgtcatccaggatcaactcctaaggctatccctttttgctgatagccttagcggttgtcagcgacctcaatttttcccgtcgcgctgagtcaggctgtttaatggtctgaaacccaatttgtttctgtgtgcccaccgaactgtccgatattttaagcattgggagtcccggtcatgctgagcgcatttcaactggaaaataaccgactgacccggctggaagtcgaagagtcacaaccccttgtaaatgcagtatggattgatcttgtcgaaccggacgacgacgagcgactgcgcgtacaatctgaacttggccagagcctggcaacccgcccggaactggaagacatcgaagcatcggcacgtttctttgaagacgacgacggcctgcatattcactccttcttcttctttgaagatgcggaagatcacgccggtaactccactgtggcatttaccatccgtgatggtcgtctgtttactctgcgtgagcgtgaactgcccgcttttcgtctgtatcgtatgcgtgcccgtagccagtcgatggtagacggtaacgcctacgagttgctgctggatctgttcgaaaccaaaatcgaacagttggcagatgaaattgaaaatatctatagcgacctggagcagttgagccgggtgattatggaagggcatcagggcgatgagtacgacgaggcgctctccactctggcggaactggaagatatcggctggaaagttcgcctgtgtctgatggatacccagcgcgcgctcaacttcctggtgcgtaaagcgcgtttaccgggtgggcaactggagcaggcgcgtgaaatcctgcgagatatcgaatccctgctgccgcataacgaatccctgttccagaaggtgaacttcctgatgcaggcggcaatgggttttatcaacatcgagcagaaccgcatcatcaaaatcttctcggtggtatccgtggtattcctgccgccgacgctcgttgcttccagctatggcatgaactttgagtttatgccagaactgaagtggagcttcggctaccctggcgcgattatctttatgatcctcgcgggcctggcaccgtatctgtactttaagcggaagaactggttgtaaaaaacgagagcggtggcttagtctggctaagccacctgttattcaaaggctccaggtatttaacccttttacctctttctcatagaaccatttgttcgtgttaacagcaacataggctgctacggcaattcccagaatgttaacgccaattagtgcaccaacaaatagagatagaataccaagtaatagaactataattgcttttttccataaccccaggacaaataaatatatccaggaacagaagaaagcaatgaaattcatttgaatagttaagcgttgtcttacttttaatgctttaaatgctgctttatattctggtgttgccccccagaatccaggaaaaccatgttgatcataaaaattaaatcggtatttccatttttcacttaatgaaccatcgttcatatattccttactcataaatactccataactattgttttgatgaatcagtaggtgcaagcattagcatactgaaagtggaaaaataacaaatcaaaaaaatcatcgaaccattgcctgaacaggcaaaatcttcggctatcattgtgatgatagagatgatatatactgctaatgtaccaaaaacataagtttttatatagatgaaaccactatcacggagtcgctggcaattcatgttgatgacgagataatggagtacgatggtagagactataacaagaaagcctgcttctccatcgttaaaaaagataataagaaaggcaaaaatgaaatttattaaaataaatgaaaatatataacgacgtctggaaatcttaccgttagatgttgggataaatatacgtaacataaattttacatccttgtatgagtctccggtcagcatggcaatatgcccactctcatgcaagagtcggcatattttttcagaatatatttattttttatttggacgttctacgctgcgtataaatcgcatccatcacaaaaattgccagcgccacccaaataaaggcgaaagtcaccatcttatcggcacccggtttttcaccataaaacgtcacagccagcaggaacatcagcgtcgggccaatgtactggaaaaagcctaacgttgagagacgcaagcgcgtggcagcggcggtaaaacacaacagcggtacggtagtgacaataccggcggcgatcagcagtaaattcagcgacatcgggttttgccccatatggctggttgagctgtcggcaatagcaaacaggtaaattgccgccacgggcagcagccacatggtttcgattaacatgccggtttgcgcttcaacggcaatcttcttgcgtaccagaccgtagaaggcaaaactaaatgccagtcccagcgcgataataggtagcgaaccaaaagtccacagctggactaacacgccacatatcgccagaatcaccgccagccattgcatccggcggaatcgctcgccgaggaaaatcatccccagcacaatgttcaccagcgggttaataaagtaaccaaggctcgcttccagcatatggtgattgttcaccgcccagataaacagtagccagttgccaccaatcagcacggcagagactgccagcataaaaattttctgtggcgtctgaatcagcgtttttaaataggaccactggcggcaaatgctcatcagcaccaccataaagaaaaacgaccagatcacgcgatgcgtcaggatttcatcggcgggcacgtagtaaatcaacttgaagtacgctggcgctataccccaaataaaataagcggcaagagcgagtaatacgccctgccgcgtttgttttgcatccatcgggaatactcatttttaattggtaacagcagtttacctgcttttatgtcttcaacctaccatataggtggcggtggcactggcaatataaagctgttcttcattgtgtaattcaacgcgggcgacggcgactttattgcctgcacgcaacaggctactagtagcagtaaaacgctcgcccctgcctgggcgcagataatcaacgcgaagatcaatggtccccatccgcgatagccgctggcgtagttcatcttcactgatggtttcgtggcgggttaaggtacttcccacgcacaccagaccggcggcgacatccagcgccgacgcaatgaccccgccgtgcaaaatgctttgcgcccagttgcccaccatcattggctgatttttaaaggccagctgtgcgaactctttttcgtaacgctccagttccatccccaatgcgcggttaaatggcatgtgataaacaaacatctcacccactaatttcagggcttgttcagcggtcagtacggcagacatatcatccttacacttcattggttaatgaaatgttgattttatgcttctttgttgttggtttctactttaggaagggataactaacggctatggagttaagtatgtaaaatagcccgcagaaaaatattcaccttatcaataattcgttacggagaacacgaccgatgcggactctgcagggctggttgttgccggtgtttatgttgcctatggcagtatatgcacaagaggcaacggtgaaagaggtgcatgacgcgccagcggtgcgtggcagtattatcgccaatatgctgcaggagcatgacaatccgttcacgctctatccttatgacaccaactacctcatttacacccaaaccagcgatctgaataaagaagcgattgccagttacgactgggcggaaaatgcgcgtaaggatgaagtaaagtttcagttgagcctggcatttccgctgtggcgtgggattttaggcccgaactcggtgttgggtgcgtcttatacgcaaaaatcctggtggcaactgtccaatagcgaagagtcttcaccgtttcgtgaaaccaactacgaaccgcaattgttcctcggttttgccaccgattaccgttttgcaggttggacgctgcgcgatgtggagatggggtataaccacgactctaacgggcgttccgacccgacctcccgcagctggaaccgcctttatactcgcctgatggcagaaaacggtaactggctggtagaagtgaagccgtggtatgtggtgggtaatactgacgataacccggatatcaccaaatatatgggttactaccagcttaaaatcggctatcacctcggtgatgcggtgctcagtgcgaaaggacagtacaactggaacaccggctacggcggcgcggagttaggcttaagttacccgatcaccaaacatgtgcgcctttatactcaggtttacagcggctatggcgaatcgctcatcgactataacttcaaccagacccgtgtcggtgtgggggttatgctaaacgatttgttttgatgaacggttgagtggttggcaaatctggaatccagcatccaggattaccctctcagagactaaaagcattgcagtttctcgcgcaggcgctgaaaatagcgcctgtttttatttcaggcaatcggggtgaatgtggcgcaggcggaagtgttgaatctggagtccggagctaaacaggttttacaagaaacctttggctaccaacagtttcgccccggccaggaagaaattatcgacactgtgctttccggccgcgattgcctcgtcgtcatgcccactggtggcggaaaatccctttgctatcaaatccctgccttattgctaaacggccttaccgtggttgtttcaccgctgatttcgttgatgaaagatcaggtggatcaactgcaagccaacggcgtggcggcggcgtgccttaactcgacgcaaacccgcgaacagcaacttgaagtgatgacaggctgccgcaccgggcaaattcgtctgctttatatcgccccggaacgcctgatgctggataactttcttgagcatctggcgcactggaatccggtgttattagccgttgatgaagcgcactgtatctcccaatggggccacgatttccgcccggaatatgccgcgctcggtcagttgcgccagcggttcccgacgctgccgtttatggcgctgaccgccacagccgacgacaccacgcgccaggatatcgtgcgcctgctggggctgaacgatccgctgattcaaatcagcagttttgaccgtccgaatattcgctacatgctgatggagaagttcaaaccgctcgatcagttgatgcgctacgtgcaggaacagcgcggtaagtcaggcattatctactgcaacagccgcgcgaaagtagaagacaccgctgcgcgcctgcaaagcaagggaattagcgcggcggcctatcatgccgggctggaaaataatgttcgcgccgatgtgcaggaaaaattccagcgcgatgacctgcaaattgtggtggcgacggtggcgttcggcatgggcatcaataaaccaaacgttcgcttcgtggtccactttgatattccgcgcaatatcgaatcctattatcaggaaaccggacgcgccgggcgtgatggcctgcccgcggaagcgatgctgttttacgatccggctgatatggcgtggctgcgccgttgtctggaagagaagccgcaggggcagttgcaggatatcgagcgccacaaactcaatgcgatgggcgcgtttgccgaagcgcaaacttgccgtcgtctggtattgctgaactattttggcgaagggcgtcaggagccgtgcgggaactgcgatatctgcctcgatccgccgaaacagtacgacggttcaaccgatgctcagattgccctttccaccattggtcgtgtgaatcagcggtttgggatgggttatgtggtggaagtgattcgtggtgctaataaccagcgtatccgcgactatggtcatgacaaactgaaagtctatggcatgggccgtgataaaagccatgaacattgggtgagcgtgatccgccagctgattcacctcggcctggtgacgcaaaatattgcccagcattctgccctacaactgacagaggccgcgcgcccggtgctgcgcggcgaatcctctttgcaacttgccgtgccgcgtatcgtggcgctcaaaccgaaagcgatgcagaaatcgttcggcggcaactatgatcgcaaactgttcgccaaattacgcaaactgcgtaaatcgatagccgatgaaagtaatgtcccgccgtacgtggtgtttaacgacgcaaccttgattgagatggctgaacagatgccgatcaccgccagcgaaatgctcagcgttaacggcgttgggatgcgcaagctggaacgctttggcaaaccgtttatggcgctgattcgtgcgcatgttgatggcgatgacgaagagtagtcagcagcataaaaaagtgccagtatgaagactccgtaaacgtttcccccgcgagtcaaatgtatgttgatgttatttctcaccgtcgccatggtgcacattgtggcgcttatgagccccggtcccgatttcttttttgtctctcagaccgctgtcagtcgttcccgtaaagaagcgatgatgggcgtgctgggcattacctgcggcgtaatggtttgggctgggattgcgctgcttggcctgcatttgattatcgaaaaaatggcctggctgcatacgctgattatggtgggcggtggcctgtatctctgctggatgggttaccagatgctacgtggtgcactgaaaaaagaggcggtttctgcacctgcgccacaggtcgagctggcgaaaagtgggcgcagtttcctgaaaggtttactgaccaatctcgctaatccgaaagcgattatctactttggctcggtgttctcattgtttgtcggtgataacgttggcactaccgcgcgctggggcatttttgcgctgatcattgtcgaaacgctggcgtggtttaccgtcgttgccagcctgtttgccctgccgcaaatgcgccgtggttatcaacgtctggcgaagtggattgatggttttgccggggcgttatttgccggatttggcattcatttgattatttcgcggtgatgccagacgcgtcttcagagtaagtcggataaggcgtttacgccgcatccgacattatttttcacgcatgcctcgccgatgctaacagcgctcccaccagcataaacaacgagccgaaaatcttattcagcgccttcatctgctttggtcctttaatccatagagcaatccgttgagcaagggtggcgtaaccgatcatcacaataatatcgaccacaatagtggtgacgccgagcacgatatactgcatcagttgcggctgttgcggcatgatgaattgcggaaatagcgccgccagaaacacaatacttttgggattggtgagattcacaaaaactgcgcgctggaacaaatgtcgacgcgattgagtagaggccagcgatttaaggtcaattgcaccagcggcgcgccactgctggattcccagccaaatcaagtaagccgcgcctgcccacttcaacacttcaaacgcaatcactgagcgggaaaatagcgtccccaaccccacgccaaccagcacaatatgaatcgccagtccggtctgaagcccagcaatagacgccaccgcgccgcgataaccgtggttgagcgaggtggtcatagtgttgattgcaccagagcctggcgacaggcttaaaatgatcgatgtcagcaggtaggcaaaccaccattctaaggtcatgatgaactcccggtgtgtctatttttgtgccacaatacgctactgtcgcagcgttgtgtcaggcacgctaaaaaaaacgattttacgtggtttaagaggcagattacccgatgtttcagcagcaaaaagactgggaaacaagagaaaacgcgtttgctgcttttaccatgggaccgctgactgatttctggcgtcagcgtgatgaagcagagtttactggtgtggatgacattccggtgcgctttgtccgttttcgcgcacagcaccatgaccgggtggtagtcatctgcccggggcgtattgagagctacgtaaaatatgcggaactggcctatgacctgttccatttggggtttgatgtcttaatcatcgaccatcgcgggcagggacgttccggtcgcctgttagccgatccgcatctcgggcatgttaatcgctttaatgattatgttgatgatctggcggcattctggcagcaggaggttcagcccggtccgtggcgtaaacgctatatactggcacattcgatgggcggtgcgatctccacattatttctgcaacgccatccaggtgtatgtgacgccattgcgctaactgcgccaatgtttgggatcgtgattcgtatgccgtcatttatggcacggcagatcctcaactgggccgaagcgcatccacgtttccgtgatggctatgcaataggcaccgggcgctggcgcgcgttgccgtttgctatcaacgtactgacccacagcagacagcgatatcgacgtaacttacgcttctatgctgatgacccaacgattcgcgtcggtgggccgacctaccattgggtacgcgaaagtattctggctggcgaacaggtgttagccggtgcgggtgatgacgccacgccaacgcttctcttgcaggctgaagaggaacgcgtggtggataaccgcatgcatgaccgtttttgtgaactccgcaccgccgcgggccatcctgtcgaaggaggacggccgttggtaattaaaggtgcttaccatgagatcctttttgaaaaggacgcaatgcgctcagtcgcgctccacgccatcgttgattttttcaacaggcataactcacccagcggaaaccgctctacagaggtttaaatttcttatgtaccaggttgttgcgtctgatttagatggcacgttactttctcccgaccatacgttatccccttacgccaaagaaactctgaagctgctcaccgcgcgcggcatcaactttgtgtttgcgaccggtcgtcaccacgttgatgtggggcaaattcgcgataatctggagattaagtcttacatgattacctccaatggtgcgcgcgttcacgatctggatggtaatctgatttttgctcataacctggatcgcgacattgccagcgatctgtttggcgtagtcaacgacaatccggacatcattactaacgtttatcgcgacgacgaatggtttatgaatcgccatcgcccggaagagatgcgcttttttaaagaagcggtgttccaatatgcgctgtatgagcctggattactggagccggaaggcgtcagcaaagtgttcttcacctgcgattcccatgaacaactgctgccgctggagcaggcgattaacgctcgttggggcgatcgcgtcaacgtcagtttctctaccttaacctgtctggaagtgatggcgggcggcgtttcaaaaggccatgcgctggaagcggtggcgaagaaactgggctacagcctgaaggattgtattgcgtttggtgacgggatgaacgacgccgaaatgctgtcgatggcggggaaaggctgcattatgggcagtgcgcaccagcgtctgaaagaccttcatcccgagctggaagtgattggtactaatgccgacgacgcggtgccgcattatctgcgtaaactctatttatcgtaatcgttctttatttggtcagttgtcaacctgatacttcgctacaatggatacccgttaatcaaagagttttccattgtggcgctacttatcatcaccacgattctgtgggccttctcctttagcttttatggcgagtaccttgcggggcacgtcgatagctattttgcggtgctggtgcgcgttggcctggcggcactcgtttttctgccgtttctgcgtacccgtggcaatagcctgaaaacggtcggcctgtatatgctggtgggcgcgatgcagcttggcgtgatgtatatgctgagtttccgcgcttatctctacctgacggtttccgagctgctgctgttcaccgtgctgacgccgctctacatcacgctgatttatgacatcatgagtaagcgccgtctgcgctggggctatgcctttagcgccttgctggcggtgattggtgccgggattattcgctatgatcaggtcaccgaccatttctggactggcttgctgctggtgcaactctccaatatcacttttgccattggcatggtgggttacaaacgcctgatggaaactcgcccgatgccacagcataacgcctttgcgtggttctatcttggcgcgtttctggtggcagtgattgcatggttcttgctgggaaatgcgcagaaaatgccgcaaaccacgctgcaatggggcattctggtgtttcttggcgtggtggcttccgggattggctactttatgtggaactacggcgcgacgcaggtggacgccggaacgctgggcattatgaataatatgcacgtttcggcagggctgctggtaaacctggctatctggcaccaacagccgcactggccaacgtttattacaggcgcgctggtgatcctggcctcactgtgggtgcatcgtaagtgggtcgctccgcgctcttcacaaacggcagatgatcgcaggcgtgattgcgcgctgagcgaataaacgcttccgtaactggctgacgctgctcgccatcgcgcacggcggcgtacagtcggctccacaagccttcgcccagggttttggtcaccaccagaccctggcgctcaaaactctctactacccaatgcggtagcgcggcaatacccatccgcgcggcaaccatctgaatcaacaataaggtgttatcgacgcttttcagtgacgggctgacgcctgccggctgaagaaaatgccgccagacatccagtcgactacgctgcaccggataaattaatagcgtctcgctggcgagatcttccggtgtaattcgcgttttcgccgccagtggatggtcaggtgctaacaccagacgcacttcatagtcgaacatcggcgaataatgcaggccactgcgcggcagaatatcggacgtcattaccagatccagctctccctgttgcaaggcgggctgcgggtcaaatgtcacgcccgatttaaaatccatctctacctgcggccagttcttatggaaattttctaacgcgggtgtcagccactgaatacagctatggcactcaatggcaatgcgcagacgcgtctgctgcggttcattgcaggcttgcagggcctggctaatttgcggcagtacctggtttgccagttgcaacaggatttctccctgcggtgtaaagcgtagcggctggctcttacgcacaaatagccggaagccaaggcgttgttccagatcgctaaactggtgagacagggcggattgcgtctgatgcaacgtcgccgcagcggctgcgagcgagccgcagttccgcaacgcttgtagcgttttcaggtgttttacttcgatcatgaaagtccttcacttcggcatgaataatttgcgcttgaggaatatacagtaaccgccaattatggatgtgtaaacatctggacggctaaaatccttcgtcttttaaatttatggtgcgttggctgcgtttctccaccccggtcacttacttcagtaagctcccggggatgaataaacttgccgccttccctaaattcaaaatccataggatttacatataattagaggaagaaaaaatgacaatattgaatcacaccctcggtttccctcgcgttggcctgcgtcgcgagctgaaaaaagcgcaagaaagttattgggcggggaactccacgcgtgaagaactgctggcggtagggcgtgaattgcgtgctcgtcactgggatcaacaaaagcaagcgggtatcgacctgctgccggtgggcgattttgcctggtacgatcatgtactgaccaccagtctgctgctgggtaacgttccggcgcgtcatcagaacaaagatggttcggtagatatcgacaccctgttccgtattggtcgtggacgtgcgccgactggcgaacctgcggcggcagcggaaatgaccaaatggtttaacaccaactatcactacatggtgccggagttcgttaaaggccaacagttcaaactgacctggacgcagctgctggacgaagtggacgaggcgctggcgctgggccacaaggtgaaacctgtgctgctggggccggttacctggctgtggctggggaaagtgaaaggtgaacaatttgaccgcctgagcctgctgaacgacattctgccggtttatcagcaagtgctggcagaactggcgaaacgcggcatcgagtgggtacagattgatgaacccgcgctggtactggaactaccacaggcgtggctggacgcatacaaacccgcttacgacgcgctccagggacaggtgaaactgctgctgaccacctattttgaaggcgtaacgccaaatctcgacacgattactgcgctgcctgttcagggtctgcatgttgacctcgtacatggtaaagatgacgttgctgaactgcacaagcgcctgccttctgactggttgctgtctgcgggtctgatcaatggtcgtaacgtctggcgcgccgatcttaccgagaaatatgcgcaaattaaggacattgtcggcaaacgtgatttgtgggtggcatcttcctgctcgttgctgcacagccccatcgacctgagcgtggaaacgcgtcttgatgcagaagtgaaaagctggtttgccttcgccctacaaaaatgccatgaactggcactgctgcgcgatgcgctgaacagtggtgacacggcagctctggcagagtggagcgccccgattcaggcacgtcgtcactctacccgcgtacataatccggcggtagaaaagcgtctggcggcgatcaccgcccaggacagccagcgtgcgaatgtctatgaagtgcgtgctgaagcccagcgtgcgcgttttaaactgccagcgtggccgaccaccacgattggttccttcccgcaaaccacggaaattcgtaccctgcgtctggatttcaaaaagggcaatctcgacgccaacaactaccgcacgggcattgcggaacatatcaagcaggccattgttgagcaggaacgtttgggactggatgtgctggtacatggcgaggccgagcgtaatgacatggtggaatactttggcgagcacctcgacggatttgtctttacgcaaaacggttgggtacagagctacggttcccgctgcgtgaagccaccgattgtcattggtgacattagccgcccggcaccgattaccgtggagtgggcgaagtatgcgcaatcgctgaccgacaaaccggtgaaagggatgctgacggggccggtgaccatactctgctggtcgttcccgcgtgaagatgtcagccgtgaaaccatcgccaaacagattgcgctggcgctgcgtgatgaagtggccgatctggaagccgctggaattggcatcatccagattgacgaaccggcgctgcgcgaaggtttaccgctgcgtcgtagcgactgggatgcgtatctccagtggggcgtagaggccttccgtatcaacgccgccgtggcgaaagatgacacacaaatccacactcacatgtgttattgcgagttcaacgacatcatggattcgattgcggcgctggacgcagacgtcatcaccatcgaaacctcgcgttccgacatggagttgctggagtcgtttgaagagtttgattatccaaatgaaatcggtcctggcgtctatgacattcactcgccaaacgtaccgagcgtggaatggattgaagccttgctgaagaaagcggcaaaacgcattccggcagagcgcctgtgggtcaacccggactgtggcctgaaaacgcgcggctggccagaaacccgcgcggcactggcgaacatggtgcaggcggcgcagaacttgcgtcgggggtaaaatccaaaccgggtggtaataccacccggtcttttctcattacagcgacttcttcccaccatactgcttaaaccattccagcatacgctgccagccatcttctgcagatgcggcatgatagctcgggcgataatcagcgttgaatgcatgcccggcgtccgggtacacgataatctctgctttcgcattagcagcccgcagcgcctggcgcatggtttcaacgctctcctgcggaatgctgttatcctgaccaccatataagccgagaatcggcgcgttaagatcggttgcgatatcaacaggttgtttcggtgaattcagcgacttgtcgcccgtcagtttgccgtaccacgccactgcggcttttagctgtggattatgcgcggcatacagccaggtgatacgtccaccccagcagaatccggtgatcattaaacgatgaacatcgccgccgttgcgggaagcccaactggcgacatgatcgagatcggccagcacctgcgagtcaggcacttttgctaccagaccgctaagcaacgtggggatatcggcaaaatcattcggatcgccttcgcggaagtaaagttcaggtgcgatagccagatacccctccagcgccagacggcgacaaatgtcgcggatatgttcatgcacgccaaaaatttcctgcactacaatgaccactggcagtgggccatcgctttgctttggtctggcatggtaagcaggcatgttatccccttgtgaagggatagaggtgaagcccgccacaatcgcgtcgtccggggtctgaacgatggtcgaagcgagaggcgatgcagcaggtgcaaatccagattgttgtgttgttgccatggtattctccgtacccttataaaaatgttgcgcaatgttaactatagtcagcatgcaacaaatcacattgcctgaatcggctcatcttttatgcagtcctgcagaatgaagggtgatttatgtgatttgcatcacttttggtgggtaaatttatgcaacgcatttgcgtcatggtgatgagtatcacgaaaaaatgttaaacccttcggtaaagtgtctttttgcttcttctgactaaaccgattcacagaggagttgtatatgtccaagtctgatgtttttcatctcggcctcactaaaaacgatttacaaggggctacgcttgccatcgtccctggcgacccggatcgtgtggaaaagatcgccgcgctgatggataagccggttaagctggcatctcaccgcgaattcactacctggcgtgcagagctggatggtaaacctgttatcgtctgctctaccggtatcggcggcccgtctacctctattgctgttgaagagctggcacagctgggcattcgcaccttcctgcgtatcggtacaacgggcgctattcagccgcatattaatgtgggtgatgtcctggttaccacggcgtctgtccgtctggatggcgcgagcctgcacttcgcaccgctggaattcccggctgtcgctgatttcgaatgtacgactgcgctggttgaagctgcgaaatccattggcgcgacaactcacgttggcgtgacagcttcttctgataccttctacccaggtcaggaacgttacgatacttactctggtcgcgtagttcgtcactttaaaggttctatggaagagtggcaggcgatgggcgtaatgaactatgaaatggaatctgcaaccctgctgaccatgtgtgcaagtcagggcctgcgtgccggtatggtagcgggtgttatcgttaaccgcacccagcaagagatcccgaatgctgagacgatgaaacaaaccgaaagccatgcggtgaaaatcgtggtggaagcggcgcgtcgtctgctgtaattctcttctcctgtctgaaggccgacgcgttcggccttttgtatttttgcgtagcgcctcgcaggaaatgcctttccaactggacgtttgtacagcacaattctattttgtgcgggtaagttgttgcgtcaggaggcgttgtggatttctcaatcatggtttacgcagttattgcgttggtgggtgtggcaattggctggctgtttgccagttatcaacatgcgcagcaaaaagccgagcaattagctgaacgtgaagagatggtcgcggagttaagcgcggcaaaacaacaaattacccaaagcgagcactggcgtgcagagtgcgagttactcaataacgaagtgcgcagcctgcaaagtattaacacctctctggaggccgatctgcgtgaagtaaccacgcggatggaagccgcacagcaacatgctgacgataaaattcgccagatgattaacagcgagcagcgcctcagtgagcagtttgaaaacctcgccaaccgtatttttgagcacagcaatcgccgggttgatgagcaaaaccgtcagagtctgaacagcctgttgtcgccgctacgtgaacaactggacggtttccgccgtcaggttcaggacagcttcggtaaagaagcacaagaacgccataccctgacccacgaaattcgcaatctccagcaactcaacgcgcaaatggcccaggaagcgatcaacctgacgcgcgcgctgaaaggcgacaataaaacccagggcaactggggcgaggtagtattgacgcgggtgctggaggcttccggtctgcgtgaagggtatgaatatgaaacccaggtcagcatcgaaaatgacgcccgctcgcggatgcagccggatgtcatcgtgcgcctgccgcagggaaaagatgtggtgatcgacgccaaaatgacgctggtcgcctatgaacgctattttaacgccgaagacgactacacccgcgaaagcgcgctacaggaacatatcgcgtcggtgcgtaaccatatccgtttgctgggacgcaaagattatcaacagctgccggggctgcgaactctggattacgtgctgatgtttattcccgttgaacccgcttttttactggcgcttgaccgccagccggagctgatcaccgaagcgttgaaaaacaacatcatgctggttagcccgactacgctgctggtggcgctgcgcactatcgccaacctgtggcgttatgagcatcaaagccgcaacgcccagcaaatcgccgatcgtgccagcaagctgtacgacaagatgcgtttgttcatcgatgacatgtccgcgattggtcaaagtctcgacaaagcgcaggataattatcggcaggcaatgaaaaaactctcttcagggcgcggaaatgtgctggcgcaggcagaagcgtttcgcggtttaggagtagaaattaaacgcgagattaatccggatttggctgaacaggcggtgagccaggatgaagagtatcgacttcggtcggttccggagcagccgaatgatgaagcttatcaacgcgatgatgaatataatcagcagtcgcgctagcccattgggagtagttaagccgggtagaaatctagggcatcgacgcccaatctgttacacttctggaacaattttttgatgagcaggcattgagatggtggataagtcacaagaaacgacgcactttggttttcagaccgtcgcgaaggaacaaaaagcggatatggtcgcccacgttttccattccgtggcatcaaaatacgatgtcatgaatgatttgatgtcatttggtattcatcgtttgtggaagcgattcacgattgattgcagcggcgtacgccgtgggcagaccgtgctggatctggctggtggcaccggcgacctgacagcgaaattctcccgcctggtcggagaaactggcaaagtggtccttgctgatatcaatgaatccatgctcaaaatgggccgcgagaagctgcgtaatatcggtgtgattggcaacgttgagtatgttcaggcgaacgctgaggcgctgccgttcccggataacacctttgattgcatcaccatttcgtttggtctgcgtaacgtcaccgacaaagataaagcactgcgttcaatgtatcgcgtgctgaaacccggcggccgcctgctggtgcttgagttctcgaagccaattatcgagccgctgagcaaagcctatgatgcatactccttccatgtgctgccgcgtattggctcactggtcgcgaacgacgccgacagctaccgttatctggcagaatccatccgtatgcatcccgatcaggataccctgaaagccatgatgcaggatgccggattcgaaagtgtcgactactacaatctgacggcaggggttgtggcgctgcatcgtggttataagttctgacaggagaccggaaatgccttttaaacctttagtgacggcaggaattgaaagtctgctcaacaccttcctgtatcgctcacccgcgctgaaaacggcccgctcgcgtctgctgggtaaagtattgcgcgtggaggtaaaaggcttttcgacgtcattgattctggtgttcagcgaacgccaggttgatgtactgggcgaatgggcaggcgatgctgactgcaccgttatcgcctacgccagtgtgttgccgaaacttcgcgatcgccagcagcttaccgcactgattcgcagtggtgagctggaagtgcagggcgatattcaggtggtgcaaaacttcgttgcgctggcagatctggcagagttcgaccctgcggaactgctggccccttataccggtgatatcgccgctgaaggaatcagcaaagccatgcgcggaggcgcaaagttcctgcatcacggcattaagcgccagcaacgttatgtggcggaagccattactgaagagtggcgtatggcacccggtccgcttgaagtggcctggtttgcggaagagacggctgccgtcgagcgtgctgttgatgccctgaccaaacggctggaaaaactggaggctaaatgacgccaggtgaagtacggcgcctatatttcatcattcgcacttttttaagctacggacttgatgaactgatccccaaaatgcgtatcaccctgccgctacggctatggcgatactcattattctggatgccaaatcggcataaagacaaacttttaggtgagcgactacgactggccctgcaagaactggggccggtttggatcaagttcgggcaaatgttatcaacccgccgcgatctttttccaccgcatattgccgatcagctggcgttattgcaggacaaagttgctccgtttgatggcaagctggcgaagcagcagattgaagctgcaatgggcggcttgccggtagaagcgtggtttgacgattttgaaatcaagccgctggcttctgcttctatcgcccaggttcataccgcgcgattgaaatcgaatggtaaagaggtggtgattaaagtcatccgcccggatattttgccggttattaaagcggatctgaaacttatctaccgtctggctcgctgggtgccgcgtttgctgccggatggtcgccgtctgcgcccaaccgaagtggtgcgcgagtacgaaaagacattgattgatgaactgaatttgctgcgggaatctgccaacgccattcagcttcggcgcaattttgaagacagcccgatgctctacatcccggaagtttaccctgactattgtagtgaagggatgatggtgatggagcgcatttacggcattccggtgtctgatgttgcggcgctggagaaaaacggcactaacatgaaattgctggcggaacgcggcgtgcaggtgttcttcactcaggtctttcgcgacagctttttccatgccgatatgcaccctggcaacatcttcgtaagctatgaacacccggaaaacccgaaatatatcggcattgattgcgggattgttggctcgctaaacaaagaagataaacgctatctggcagaaaactttatcgccttctttaatcgcgactatcgcaaagtggcagagctacacgtcgattctggctgggtgccaccagataccaacgttgaagagttcgaatttgccattcgtacggtctgtgaacctatctttgagaaaccgctggccgaaatttcgtttggacatgtactgttaaatctgtttaatacggcgcgtcgcttcaatatggaagtgcagccgcaactggtgttactccagaaaaccctgctctacgtcgaaggggtaggacgccagctttatccgcaactcgatttatggaaaacggcgaagcctttcctggagtcgtggattaaagatcaggtcggtattcctgcgctggtgagagcatttaaagaaaaagcgccgttctgggtcgaaaaaatgccagaactgcctgaattggtttacgacagtttgcgccagggcaagtatttacagcacagtgttgataagattgcccgcgagcttcagtcaaatcatgtacgtcagggacaatcgcgttattttctcggaattggcgctacgttagtattaagtggcacattcttgttggtcagccgacctgaatgggggctgatgcccggctggttaatggcaggtggtctgatcgcctggtttgtcggttggcgcaaaacacgctgattttttcatcgctcaaggcgggccgtgtaacgtataatgcggctttgtttaatcatcatctaccacagaggaacatgtatgggtggtatcagtatttggcagttattgattattgccgtcatcgttgtactgctttttggcaccaaaaagctcggctccatcggttccgatcttggtgcgtcgatcaaaggctttaaaaaagcaatgagcgatgatgaaccaaagcaggataaaaccagtcaggatgctgattttactgcgaaaactatcgccgataagcaggcggatacgaatcaggaacaggctaaaacagaagacgcgaagcgccacgataaagagcaggtgtaatccgtgtttgatatcggttttagcgaactgctattggtgttcatcatcggcctcgtcgttctggggccgcaacgactgcctgtggcggtaaaaacggtagcgggctggattcgcgcgttgcgttcactggcgacaacggtgcagaacgaactgacccaggagttaaaactccaggagtttcaggacagtctgaaaaaggttgaaaaggcgagcctcactaacctgacgcccgaactgaaagcgtcgatggatgaactacgccaggccgcggagtcgatgaagcgttcctacgttgcaaacgatcctgaaaaggcgagcgatgaagcgcacaccatccataacccggtggtgaaagataatgaagctgcgcatgagggcgtaacgcctgccgctgcacaaacgcaggccagttcgccggaacagaagccagaaaccacgccagagccggtggtaaaacctgctgcggacgctgaaccgaaaaccgctgcaccttccccttcgtcgagtgataaaccgtaaacatgtctgtagaagatactcaaccgcttatcacgcatctgattgagctgcgtaagcgtctgctgaactgcattatcgcggtgatcgtgatattcctgtgtctggtctatttcgccaatgacatctatcacctggtatccgcgccattgatcaagcagttgccgcaaggttcaacgatgatcgccaccgacgtggcctcgccgttctttacgccgatcaagctgacctttatggtgtcgctgattctgtcagcgccggtgattctctatcaggtgtgggcatttatcgccccagcgctgtataagcatgaacgtcgcctggtggtgccgctgctggtttccagctctctgctgttttatatcggcatggcattcgcctactttgtggtctttccgctggcatttggcttccttgccaataccgcgccggaaggggtgcaggtatccaccgacatcgccagctatttaagcttcgttatggcgctgtttatggcgtttggtgtctcctttgaagtgccggtagcaattgtgctgctgtgctggatggggattacctcgccagaagacttacgcaaaaaacgcccgtatgtgctggttggtgcattcgttgtcgggatgttgctgacgccgccggatgtcttctcgcaaacgctgttggcgatcccgatgtactgtctgtttgaaatcggtgtcttcttctcacgcttttacgttggtaaagggcgaaatcgggaagaggaaaacgacgctgaagcagaaagcgaaaaaactgaagaataaattcaaccgcccgtcagggcggttgtcatatggagtacaggatgtttgatatcggcgttaatttgaccagttcgcaatttgcgaaagaccgtgatgatgttgtagcgtgcgcttttgacgcgggagttaatgggctactcatcaccggcactaacctgcgtgaaagccagcaggcgcaaaagctggcgcgtcagtattcgtcctgttggtcaacggcgggcgtacatcctcacgacagcagccagtggcaagctgcgactgaagaagcgattattgagctggccgcgcagccagaagtggtggcgattggtgaatgtggtctcgactttaaccgcaacttttcgacgccggaagagcaggaacgcgcttttgttgcccagctacgcattgccgcagatttaaacatgccggtatttatgcactgtcgcgatgcccacgagcggtttatgacattgctggagccgtggctggataaactgcctggtgcggttcttcattgctttaccggcacacgcgaagagatgcaggcgtgcgtggcgcatggaatttatatcggcattaccggttgggtttgcgatgaacgacgcggactggagctgcgggaacttttgccgttgattccggcggaaaaattactgatcgaaactgatgcgccgtatctgctccctcgcgatctcacgccaaagccatcatcccggcgcaacgagccagcccatctgccccatattttgcaacgtattgcgcactggcgtggagaagatgccgcatggctggctgccaccacggatgctaatgtcaaaacactgtttgggattgcgttttagagtttgcggaactcggtattcttcacactgtgcttaatctctttattaataagattaagcaatagcatggagcgagcctcaccatcgggttcggtgaaaatggcctgaaagccttcgaacgcgccttcggtaataatcaccttatcacccggataaggggttgccggatcgacaatgtctttcggtttatataccgatagctgatgaataaccgccgatgggactatcgctggcgacgcgccaaagcgcacgaagtggctgacaccgcgggtcgcgttgatagtcgtggtatgaatcacttctgggtcaaattccacaaacaggtagttggggaacaatggctcactgactgcagtacgttttccacgcacgattttttccagggtgatcatcggtgccaggcaattcacagcctgtctttcgaggtgttcctgggcacgttgaagttgcccgcgcttgcagtacagtaaataccaggattgcataatgactcttatccgtttaatcggggcgcaaggatagcaaaagctttacgctaagttaattatattccccggtttgcgttataccgtcagagttcacgctaatttaacaaatttacagcatcgcaaagatgaacgccgtataatgggcgcagattaagaggctacaatggacgccatgaaatataacgatttacgcgacttcttgacgctgcttgaacagcagggtgagctaaaacgtatcacgctcccggtggatccgcatctggaaatcactgaaattgctgaccgcactttgcgtgccggtgggcctgcgctgttgttcgaaaaccctaaaggctactcaatgccggtgctgtgcaacctgttcggtacgccaaagcgcgtggcgatgggcatggggcaggaagatgtttcggcgctgcgtgaagttggtaaattattggcgtttctgaaagagccggagccgccaaaaggtttccgcgacctgtttgataaactgccgcagtttaagcaagtattgaacatgccgacaaagcggctgcgtggtgcgccctgccaacaaaaaatcgtctctggcgatgacgtcgatctcaatcgcattcccattatgacctgctggccggaagatgccgcgccgctgattacctgggggctgacagtgacgcgcggcccacataaagagcggcagaatctgggcatttatcgccagcagctgattggtaaaaacaaactgattatgcgctggctgtcgcatcgcggcggcgcgctggattatcaggagtggtgtgcggcgcatccgggcgaacgtttcccggtttctgtggcgctgggtgccgatcccgccacgattctcggtgcagtcactcccgttccggatacgctttcagagtatgcgtttgccggattgctacgtggcaccaagaccgaagtggtgaagtgtatctccaatgatcttgaagtgcccgccagtgcggagattgtgctggaagggtatatcgaacaaggcgaaactgcgccggaagggccgtatggcgaccacaccggttactataatgaagtcgatagtttcccggtatttaccgtgacgcatattacccagcgtgaagatgcgatttaccattccacctataccgggcgtccgccagatgagcccgcggtgctgggtgtcgcactgaacgaagtgtttgtgccgattctgcaaaaacagttcccggaaattgtcgatttttacctgccgccggaaggctgctcttatcgcctggcggtagtgacaatcaaaaaacagtacgccggacacgcgaagcgcgtcatgatgggcgtctggtcgttcttacgccagtttatgtacactaaatttgtgatcgtttgcgatgatgacgttaacgcacgcgactggaacgatgtgatttgggcgattaccacccgtatggacccggcgcgggatactgttctggtagaaaatacgcctattgattatctggattttgcctcgcctgtctccgggctgggttcaaaaatggggctggatgccacgaataaatggccgggggaaacccagcgtgaatggggacgtcccatcaaaaaagatccagatgttgtcgcgcatattgacgccatctgggatgaactggctatttttaacaacggtaaaagcgcctgatgcgcgtttgttttgccctatttatcgatccgacagagaaagcgcatgacaaccttaagctgtaaagtgacctcggtagaagctatcacggataccgtatatcgtgtccgcatcgtgccagacgcggccttttcttttcgtgctggtcagtatttgatggtagtgatggatgagcgcgacaaacgtccgttctcaatggcttcgacgccggatgaaaaagggtttatcgagctgcatattggcgcttctgaaatcaacctttacgcgaaagcagtcatggaccgcatcctcaaagatcatcaaatcgtggtcgacattccccacggagaagcgtggctgcgcgatgatgaagagcgtccgatgattttgattgcgggcggcaccgggttctcttatgcccgctcgattttgctgacagcgttggcgcgtaacccaaaccgtgatatcaccatttactggggcgggcgtgaagagcagcatctgtatgatctctgcgagcttgaggcgctttcgttgaagcatcctggtctgcaagtggtgccggtggttgaacaaccggaagcgggctggcgtgggcgtactggcaccgtgttaacggcggtattgcaggatcacggtacgctggcagagcatgatatctatattgccggacgttttgagatggcgaaaattgcccgcgatctgttttgcagtgagcgtaatgcgcgggaagatcgcctgtttggcgatgcgtttgcatttatctgagatataaaaaaacccgcccctgacaggcgggaagaacggcaactaaactgttattcagtggcatttagatctatgacgtatctggcaaaccatgcccgatgcgacgctgtcgcgtcttatcgtgcctacaaatagtccgaaccgtaggccggataaggcgtttacgccgcatccggcaattggtgcatgatgcctgatgcgacgctgtcgcgtcttatcgtgcctacaaatagtccgaaccgtaggccggataaggcgtttacgccgcatccggcaattggtgcatgatgcctgatgcgacgctggcgcgtcttatcaggcctacattggtgccggatcggtagaccggataaggcgttcacgccgcatccggcaagtggttaaacccgctcaaacaccgtcgcaataccctgacccagaccgatacacatcgtcgccagaccaaactgaacgtctttgcgttccatcagattcagcagcgtggtgctgatacgcgcaccggaacaacccagcggatgacccagcgcgatcgcgccaccgttgaggttgatcttctcgtcaatctgctcaattagtcccagatctttaatacatggcaggatctgcgcggcaaaggcttcgttcatttcaaacacgccgatatcgctggcagaaagccccgcttttttcagcgccagtttcgaggccggaaccgggccgtaacccataatcgatgggtcacaaccaacgaccgccatcgaacgcacacgagcgcgcggcttaagacctaattcatgggcgcggctttcactcatcaccagcatggcagctgcgccatcggaaagtgcagaagatgtgcccgccgttaccataccgtttactggatcaaacgccggacgcagcgtggcgagggcttccacggtggtttccgggcgaatcacttcgtcgtaattaaactgcttcaggacgccgtcggcatcgtgaccaccggtcgggatgatttcatttttaaatgcggccgactgcgtggcggcccaggcgcgggcgtgtgaccgcgcggcaaaggcatcctgcatttcacggctgataccgtgcatacgcgccagcatttctgccgttaagcccatcatgcccgccgctttggcgacattgcggctcaggccggggtgaaaatcgacgccgtgactcatcggcacatggcccatatgctccacgccgccaaccagacatgcctgcgcatcgccagtcatgatcattcgtgctgcgtcatgcagtgcctgcatggatgaaccacacaagcgattaacggtaaccgccgggacagagtgtggtacttctgccagcagcgccgcgttacgggcgatattaaaaccctgctccagcgtctgctgcacacaaccccagtaaatatcgtcgagggccgccgcttccagcgccgggttacgcgccagcaggctacgcattaaatgagcggagagatcttctgcacgcacgttacgaaaagcaccgcccttcgaacggcccatcggggtgcgaattgcatcgacaatgacaacctgttccattgtgactccttaagccgttttcaggtcgccaaccggacgggctggctcaaccggaggatagtacggttcgttatgacgcgctttattacgcagaccttccggcacttcatacagcgggccgaggtgctgatattgctgtgccatatcgaggtattttgcgctaccgagggtgtccagccagcggaacgcgccgccgtggaacggagggaagcccaggccgtagaccagcgccatatccgcttccgccggagtggcgataatgccttcctccagacagcgcaccacttcgttgaccatcgggatcatcatgcgggcgataatctcttcttcgctgaaatcgcgcttcggctggctcacttctgccagcaggtcttcaacggcggcgtcttcttctttcttcggcttacctttgctgtcttctttataacgccagaaaccgaggccgttcttctgaccaaagcggttggcatcaaacagcgcgtcgatggcatcgcggtaatctttctgcatccgctgcgggaagcctgctgccatgacagcctgagcgtgatgcgcggtatcaatgcccacaacgtccagcagatatgccgggcccatcggccagccaaactgtttttccatcactttgtcgatcttgcggaaatccgcgccgtcgcgcagcagctggctgaaaccggcgaaatacgggaacagcacgcggttaacaaagaagccggggcagtcgttaaccacaatcggcgtcttgcccatcttgctcgcccaggcgacaactttcgcgatggtttcgtcggagcttttctcgccgcgaataatttctaccaacggcattcggtggaccgggttaaagaagtgcatcccgcagaagttttccgggcgttccagcgcgttggccagttcgctgataggaatggttgaagtgttagacgccagcacggtatcctggcgtactttttgttcggtttctgccagtacggcttttttcactttcgggttttcaacaaccgcttctaccacaatatccacgcggtcaaatccggcgtagtcgagcgttgggtggattgtggagatcacgccagccagtttcagaccatcgatcttgccgcgctcaagctgcttgttcagcagtttcgcggcttcggtcatgccgagggttaacgacttgtcgttgatatctttcatgacaaccggcacgcctttccacgcagactggtaagcgatgccgccgcccataatgcctgcacccagcaccgcggcctgtttcggggtttcaacgtctttggtgagtttcttcgctttgccttttacatattgatcgttaaggaaaatgccgaccagtgcgcgggcttcgttggtatgcgccagcgggacaaaacttttgttttccaggtttaaggcttcttcacgaccaaaacgggccgcagcttcaatggtttttactgcggtgatgggggccggataatgtttccccgctgtttgtgcgaccatccctttagcgatggtgaagctcatggtggcttcaatcttgctcagttttagtggttccagcttcggctgacgttttgctttccagtcgaggtcgccgttaatggcctggcgtaaaaccgcctttgcgccttcaaccagtttttctgctttgactacgccatccaccagaccgattttcagcgcctgatccgcgccgacatctttaccggcggcaatgatttccagcgcactgtcagcgcccagcatacgtggcatacgtacagaaccgccaaagccaggcatgatgcccagtttggtttccggcagaccgatgcgcagatccggcgtcgccagacgataatcggtcgccagcacgcattcgcagccaccgcccagcgcatagccattgacggcagcaatggtcggcaccggcagatcttccaggcgattaaacacgctattggcaaagtgcagccactgacttaactgttcttcaggaacgaggaacagggacaaaaattcggtgatatcagcaccgacgataaaggctgctttgttcgaacgcagcagcagcccttttagatctgattgctgttccagcacgccgatggcctcgccgaggctggcgacggtcgcagtgtcgagtttattaactgaacctggggcatcaaataccagttcggcaatgccatcttccagccagtcaaggtacagggtgtcgcctttgtaaagcatgtcagtctcctgaatccgcaaggtgatctggtcgtaccagatgagtcgaagtgtgtattttgtgttaaaaatatgcaaacaaaagattaaagaaatgccgatctgatcacgctcggcagaaatcacgctctggatgaacgatgtgctaagatgcggagacttaaggtcaaaaaaacagaagggtaaaaaatggaatcactggcctcgctctataaaaatcatatagctaccttacaagaacggactcgcgatgcgctggcgcgcttcaagctggatgcgttacttattcactccggcgagctgttcaatgtttttctcgacgatcatccctatccgtttaaagtgaacccgcaattcaaagcgtgggtgccggtaactcaggtgccaaactgctggttgctggtggatggcgtgaacaagccgaaactgtggttctatctgccggttgattactggcacaacgtcgaaccgctgccgacctctttctggactgaagatgtggaagtgatcgcgctgccgaaagccgatggcattggtagcctgctgcctgctgcgcgcggcaatatcggttatatcggtccggtgccggaacgtgcgctgcaactgggtattgaggccagcaacatcaacccgaaaggggttatcgactacctgcattactatcgctccttcaaaactgagtacgaactggcctgtatgcgtgaagcgcagaaaatggcggtcaacggtcaccgcgcggcagaagaagcgttccgttctggcatgagcgagttcgatatcaacattgcctatctgaccgcgaccggtcatcgtgataccgacgtaccttacagcaacattgtggcgcttaacgaacacgctgcggtactgcattacaccaaactggaccatcaggcaccggaagagatgcgcagcttcctgctggatgccggggcagaatataacggctatgcggctgacctgacccgtacctggtcggcaaaaagtgacaacgactacgcgcagctggtgaaggacgttaatgatgaacaactggcgctgatcgccaccatgaaagcaggcgtcagctatgtggattaccacatccagttccatcagcgcatcgccaaactgctgcgtaaacatcaaatcatcaccgatatgagtgaagaagcgatggtcgaaaacgatcttaccgggccgtttatgccgcatggtatcggccatccgctgggcctgcaggtgcatgacgtcgctggttttatgcaggatgatagcggtacgcacctcgcggcaccggcaaaatatccgtacctgcgctgcacccgtattctccagccgggcatggtgttaaccatcgaaccgggtatctacttcatcgaatcgctactggcaccgtggcgtgaagggcagttcagcaagcacttcaactggcagaaaattgaagcactgaaaccgttcggcggcattcgtatcgaagacaacgtggtgatccacgaaaacaacgtggaaaacatgacccgggatctgaaactggcgtgatggaaagctggttaattcctgcggcaccggtcacggtcgttgaagagatcaaaaagagccgcttcataacgatgttggcgcataccgatggcgttgaggcggcgaaagcgtttgttgaatcggtgcgggcagaacaccccgatgcccggcaccattgcgtggcgtgggtcgcgggtgcgccggatgattctcaacagctgggtttctctgacgacggggagccggcgggaacggcaggtaaaccgatgctcgcccagctaatgggcagcggcgtcggggaaattaccgctgtggtagtgcgctactacggcggcatattgcttggcaccggtgggttagtgaaagcgtatggcggcggcgtgaatcaggcgctgcgccagctaacgacccaacgcaagacgccattaaccgaatatactttgcaatgtgaatatcatcagttaaccggcattgaagcgttgctggggcagtgtgacggcaaaattatcaacagtgattatcaggcattcgttctgctgcgggtggcgcttccggcggcgaaagtggctgaattttccgcaaagctggcggattttagccgtggttcattgcaattgttagcgattgaagaataatccccacttcgttttgcagaactaaggaagcggcagagatgcattttcgcgccattacccgaatcgttggactactggtcatcttattttcagggaccatgattatccctgggctggtagcactcatctaccgggatggagcgggccgcgcttttacccagaccttttttgtcgccctcgccattggctctatgctgtggtggccgaaccgcaaagagaaaggcgaacttaaatcccgtgaggggtttctgatagtggtgctgttctggaccgtgctgggtagcgtcggtgcgctcccttttatcttctcggaaagcccgaacctcacgattaccgatgcgttttttgaatctttctctggcctgaccactacgggagccactacgctggtggggctggattcgctccctcacgccatcctcttttatcgccagatgctgcaatggtttggcgggatggggatcatcgtgttggcggttgcgatactgcctatcctcggcgtgggtgggatgcagctctatcgcgcagaaatgcccggcccgctgaaagataacaaaatgcgcccgcgaattgcggaaacggcgaaaaccctgtggttgatttatgtcttgctgaccgtcgcctgtgcgctggcgttgtggtttgccggaatggatgcctttgatgccatcggccatagctttgcgactatcgctattggcggcttctcgacacatgatgccagtatcggttatttcgatagcccgactattaacactatcattgctatcttcctgctgatctccggctgtaactacggtctgcacttttcactgttaagtgggcgtagtctgaaggtttattggcgcgatccggaatttcgcatgtttatcggcgtacagtttacgctggtggttatttgtaccctcgtactgtggtttcataatgtctacagttcggcgctgatgacaattaaccaggcgtttttccaggtggtgtcgatggcgacaaccgccgggtttacaactgacagcattgcccgctggccgctctttttgccggtactgcttttatgttcagcctttatcggcggttgcgccgggtcaacgggcggtggcctgaaggtgatccgcatcctgctgctgtttaagcaggggaaccgtgagctgaaacgactggtgcatccgaacgccgtctatagcattaagctggggaatcgcgcactgccggaacgtatcctcgaagccgtttggggatttttctccgcctatgcattggtgtttattgtcagtatgctggcgattatcgccacgggcgtggatgacttttctgcctttgcgtcggttgttgcgacattgaataacctggggccagggcttggcgtggttgctgataactttaccagtatgaacccggtggctaaatggatcctgattgccaacatgctgtttggtcgtctcgaggtctttacattgctggtgctctttaccccgactttctggcgtgaatgatggagtaatacgtgaaaacattaattcttttctcaacaagggacggacaaacgcgcgagattgcctcctacctggcttcggaactgaaagaactggggatccaggcggatgtcgccaatgtgcaccgcattgaagaaccacagtgggaaaactatgaccgtgtggtcattggtgcttctattcgctatggtcactaccattcagcgttccaggaatttgtcaaaaaacatgcgacgcggctgaattcgatgccgagcgccttttactccgtgaatctggtggcgcgcaaaccggagaagcgtactccacagaccaacagctacgcgcgcaagtttctgatgaactcgcaatggcgtcccgatcgctgcgcggtcattgccggggcgctgcgttacccacgttatcgctggtacgaccgttttatgatcaagctgattatgaagatgtcaggcggtgaaacggatacgcgcaaagaagttgtctataccgattgggagcaggtggcgaatttcgcccgagaaatcgcccatttaaccgacaaaccgacgctgaaataagcataaagaataaaaaatgcgcggtcagaaaattattttaaatttcctcttgtcaggccggaataactccctataatgcgccaccactgacacggaacaacggcaaacacgccgccgggtcagcggggttctcctgagaactccggcagagaaagcaaaaataaatgcttgactctgtagcgggaaggcgtattatgcacaccccgcgccgctgagaaaaagcgaagcggcactgctctttaacaatttatcagacaatctgtgtgggcactcgaagatacggattcttaacgtcgcaagacgaaaaatgaataccaagtctcaagagtgaacacgtaattcattacgaagtttaattctttgagcgtcaaacttttaaattgaagagtttgatcatggctcagattgaacgctggcggcaggcctaacacatgcaagtcgaacggtaacaggaagaagcttgcttctttgctgacgagtggcggacgggtgagtaatgtctgggaaactgcctgatggagggggataactactggaaacggtagctaataccgcataacgtcgcaagaccaaagagggggaccttcgggcctcttgccatcggatgtgcccagatgggattagctagtaggtggggtaacggctcacctaggcgacgatccctagctggtctgagaggatgaccagccacactggaactgagacacggtccagactcctacgggaggcagcagtggggaatattgcacaatgggcgcaagcctgatgcagccatgccgcgtgtatgaagaaggccttcgggttgtaaagtactttcagcggggaggaagggagtaaagttaatacctttgctcattgacgttacccgcagaagaagcaccggctaactccgtgccagcagccgcggtaatacggagggtgcaagcgttaatcggaattactgggcgtaaagcgcacgcaggcggtttgttaagtcagatgtgaaatccccgggctcaacctgggaactgcatctgatactggcaagcttgagtctcgtagaggggggtagaattccaggtgtagcggtgaaatgcgtagagatctggaggaataccggtggcgaaggcggccccctggacgaagactgacgctcaggtgcgaaagcgtggggagcaaacaggattagataccctggtagtccacgccgtaaacgatgtcgacttggaggttgtgcccttgaggcgtggcttccggagctaacgcgttaagtcgaccgcctggggagtacggccgcaaggttaaaactcaaatgaattgacgggggcccgcacaagcggtggagcatgtggtttaattcgatgcaacgcgaagaaccttacctggtcttgacatccacggaagttttcagagatgagaatgtgccttcgggaaccgtgagacaggtgctgcatggctgtcgtcagctcgtgttgtgaaatgttgggttaagtcccgcaacgagcgcaacccttatcctttgttgccagcggtccggccgggaactcaaaggagactgccagtgataaactggaggaaggtggggatgacgtcaagtcatcatggcccttacgaccagggctacacacgtgctacaatggcgcatacaaagagaagcgacctcgcgagagcaagcggacctcataaagtgcgtcgtagtccggattggagtctgcaactcgactccatgaagtcggaatcgctagtaatcgtggatcagaatgccacggtgaatacgttcccgggccttgtacacaccgcccgtcacaccatgggagtgggttgcaaaagaagtaggtagcttaaccttcgggagggcgcttaccactttgtgattcatgactggggtgaagtcgtaacaaggtaaccgtaggggaacctgcggttggatcacctccttaccttaaagaagcgttctttgaagtgctcacacagattgtctgatgaaaatgagcagtaaaacctctacaggcttgtagctcaggtggttagagcgcacccctgataagggtgaggtcggtggttcaagtccactcaggcctaccaaatttgcacggcaaatttgaagaggttttaactacatgttatggggctatagctcagctgggagagcgcctgctttgcacgcaggaggtctgcggttcgatcccgcatagctccaccatctctgtagtgattaaataaaaaatacttcagagtgtacctgcaaaggttcactgcgaagttttgctctttaaaaatctggatcaagctgaaaattgaaacactgaacaacgaaagttgttcgtgagtctctcaaattttcgcaacacgatgatgaatcgaaagaaacatcttcgggttgtgaggttaagcgactaagcgtacacggtggatgccctggcagtcagaggcgatgaaggacgtgctaatctgcgataagcgtcggtaaggtgatatgaaccgttataaccggcgatttccgaatggggaaacccagtgtgtttcgacacactatcattaactgaatccataggttaatgaggcgaaccgggggaactgaaacatctaagtaccccgaggaaaagaaatcaaccgagattcccccagtagcggcgagcgaacggggagcagcccagagcctgaatcagtgtgtgtgttagtggaagcgtctggaaaggcgtgcgatacagggtgacagccccgtacacaaaaatgcacatgctgtgagctcgatgagtagggcgggacacgtggtatcctgtctgaatatggggggaccatcctccaaggctaaatactcctgactgaccgatagtgaaccagtaccgtgagggaaaggcgaaaagaaccccggcgaggggagtgaaaaagaacctgaaaccgtgtacgtacaagcagtgggagcacgcttaggcgtgtgactgcgtaccttttgtataatgggtcagcgacttatattctgtagcaaggttaaccgaataggggagccgaagggaaaccgagtcttaactgggcgttaagttgcagggtatagacccgaaacccggtgatctagccatgggcaggttgaaggttgggtaacactaactggaggaccgaaccgactaatgttgaaaaattagcggatgacttgtggctgggggtgaaaggccaatcaaaccgggagatagctggttctccccgaaagctatttaggtagcgcctcgtgaattcatctccgggggtagagcactgtttcggcaagggggtcatcccgacttaccaacccgatgcaaactgcgaataccggagaatgttatcacgggagacacacggcgggtgctaacgtccgtcgtgaagagggaaacaacccagaccgccagctaaggtcccaaagtcatggttaagtgggaaacgatgtgggaaggcccagacagccaggatgttggcttagaagcagccatcatttaaagaaagcgtaatagctcactggtcgagtcggcctgcgcggaagatgtaacggggctaaaccatgcaccgaagctgcggcagcgacactatgtgttgttgggtaggggagcgttctgtaagcctgtgaaggtgtgctgtgaggcatgctggaggtatcagaagtgcgaatgctgacataagtaacgataaagcgggtgaaaagcccgctcgccggaagaccaagggttcctgtccaacgttaatcggggcagggtgagtcgacccctaaggcgaggccgaaaggcgtagtcgatgggaaacaggttaatattcctgtacttggtgttactgcgaaggggggacggagaaggctatgttggccgggcgacggttgtcccggtttaagcgtgtaggctggttttccaggcaaatccggaaaatcaaggctgaggcgtgatgacgaggcactacggtgctgaagcaacaaatgccctgcttccaggaaaagcctctaagcatcaggtaacatcaaatcgtaccccaaaccgacacaggtggtcaggtagagaataccaaggcgcttgagagaactcgggtgaaggaactaggcaaaatggtgccgtaacttcgggagaaggcacgctgatatgtaggtgaagcgacttgctcgtggagctgaaatcagtcgaagataccagctggctgcaactgtttattaaaaacacagcactgtgcaaacacgaaagtggacgtatacggtgtgacgcctgcccggtgccggaaggttaattgatggggttagccgcaaggcgaagctcttgatcgaagccccggtaaacggcggccgtaactataacggtcctaaggtagcgaaattccttgtcgggtaagttccgacctgcacgaatggcgtaatgatggccaggctgtctccacccgagactcagtgaaattgaactcgctgtgaagatgcagtgtacccgcggcaagacggaaagaccccgtgaacctttactatagcttgacactgaacattgagccttgatgtgtaggataggtgggaggctttgaagtgtggacgccagtctgcatggagccgaccttgaaataccaccctttaatgtttgatgttctaacgttgacccgtaatccgggttgcggacagtgtctggtgggtagtttgactggggcggtctcctcctaaagagtaacggaggagcacgaaggttggctaatcctggtcggacatcaggaggttagtgcaatggcataagccagcttgactgcgagcgtgacggcgcgagcaggtgcgaaagcaggtcatagtgatccggtggttctgaatggaagggccatcgctcaacggataaaaggtactccggggataacaggctgataccgcccaagagttcatatcgacggcggtgtttggcacctcgatgtcggctcatcacatcctggggctgaagtaggtcccaagggtatggctgttcgccatttaaagtggtacgcgagctgggtttagaacgtcgtgagacagttcggtccctatctgccgtgggcgctggagaactgaggggggctgctcctagtacgagaggaccggagtggacgcatcactggtgttcgggttgtcatgccaatggcactgcccggtagctaaatgcggaagagataagtgctgaaagcatctaagcacgaaacttgccccgagatgagttctccctgactccttgagagtcctgaaggaacgttgaagacgacgacgttgataggccgggtgtgtaagcgcagcgatgcgttgagctaaccggtactaatgaaccgtgaggcttaaccttacaacgccgaaggtgttttggcggattgagagaagattttcagcctgatacagattaaatcagaacgcagaagcggtctgataaaacagaatttgcctggcggcagtagcgcggtggtcccacctgaccccatgccgaactcagaagtgaaacgccgtagcgccgatggtagtgtggggtctcctcatgcgagagtagggaactgccaggcatcaaataaaacgaaaggctcagtcggaagactgggcctttcgttttatctgttgtttgtcggtgaacgctctcctgagtaggacaaatccgccgggagcggatttgaacgttgcgaagcaacggcccggagggtggcgggcaggacgcccgccataaactgccaggcatcaaattaagcagaaggccatcctgacggatggcctttttgcattggcgcagaaaaaaatgccggatgcgacgctggcgcgtcttatccagcctactcttgcttatccgttctgcttttgcatccactccaccacaaaatcagccagcccctcaacatcattaatatccagtaatgcgacatcaagattaagcggcacatcactggctacagcaataacatgcctgtctatcactaattcttcaggtcgatgtccggctccatcgcgaaacagcacaatctttgcgatctcttcatgcttaaacccttcgaccagaatcaaatccagctttgaggtatccattcgacttgcgagaaactgtagatccagctcttcttcgtctggtgtttccgtcatcaaggcccatcgttgctggctggcaacgatggtttgtgccgcgccagccttgcgcagctcatagctatctttgcctggcttatcaacatccatatcatggtgcgtatgcttaatcagccctggacggatccctctggcgcataatgccgggatcagttttttcaaaagcgtagtttttccggtaccactccacgcggcaaaggcgagtaacggtatcatcgtttttcctgccatcgggcaagctcctctggcgtattcacgttaacaaatgcatctttatgatcgctgaaatcaaccgcatgaccgccagccagacgcataaataccattacccggcgttctcctgcttgcagatattccagtaataaaggctcaatagcgcggtttaccagagcaatagtcgggtgatcgcgttcaccgtcatggacccacacgacaggcgcatctttgcgctgatgattaagcctggctgctaaatcagggggaatgtaaggcgtatcgcacgggcaaaacaaaaaccactcaccagcttcctgctgcattactgaaagcattcctgccagagggcctgggtaatccgccagtgaatcttcaatcactttcagaccgcttgcctgatagatttcctgatgacgattagcattaaccacgacgtgagagagctgcgtcataagcgcgtcagcgacatgttgccataatggtttgccgtttaattcaagcaatcctttatctacgccgcccattcgtctggctttaccgcctgccagcacaacgcctgttatcgtcgtcatcagattcaccgatatcgcctcttttattgtgggattgaccctgctaacgtgtctgtctcaagagtaaggagcatcactatgaaatgtaaacgtctgaatgaagttattgaactcctccagccagcctggcaaaaagagccagaccttaacctgctgcaatttttgcagaaactggcgaaagagtcaggttttgacggcgaactggcggatttgacggatgacattctgatctatcacctgaaaatgcgtgattccgcgaaagatgcggtgatcccgggtttgcagaaagattatgaagaagacttcaaaacggcgctgttacgcgctcgcggcgtaattaaagagtaaaagcttgtaagcggcgccaccaaaatcatcgtgaaatgatatccttcgtcattcgtaatgttttccggatgatgggatgaataacagcgcttttactttccagacactacacccggataccatcatggacgctctgtttgagcatgggatccgggtggattccggtcttaccccgcttaacagctatgaaaaccgtgtctatcaatttcaggacgaagatcgtcgacgttttgtcgtcaaattttatcgccctgaacgttggacagccgatcaaatcctcgaagaacatcaatttgcgttgcagctggtaaatgatgaagttccggtcgcagcacctgtggcctttaacggtcagactttattgaatcatcagggattttatttcgctgtttttccaagcgtcggtggtcgccagttcgaagctgataatatcgatcagatggaagcggttgggcgttatttagggcgtatgcaccagacggggcgcaaacagctttttatccatcgcccgaccatcggtttgaacgaatatctcattgagccacgcaagctgtttgaggacgctacactgataccttccgggttgaaagcggcattcctgaaagcgacagatgagctgattgccgccgttacagcacactggcgggaagatttcaccgttctgcggctacatggagactgccacgccgggaatattctctggcgcgatggtccaatgtttgttgatctggatgatgcacgtaatggtccagccgttcaggatttgtggatgttgctcaatggcgataaagccgagcagcggatgcaactggaaactattattgaagcttatgaagaatttagcgagttcgacaccgctgaaatcggactgattgaacctttacgcgccatgcgtttggtttattatcttgcctggctaatgcggcgttgggctgatcccgcgttcccgaaaaatttcccgtggttaaccggggaagattactggctgcgacagacggcgacttttatagaacaggcaaaagttctacaagaaccccctttgcaattaacacctatgtattaatcggagagagtagatcatgaaaaagatttggctggcgctggctggtttagttttagcgtttagcgcatcggcggcgcagtatgaagatggtaaacagtacactaccctggaaaaaccggtagctggcgcgccgcaagtgctggagtttttctctttcttctgcccgcactgctatcagtttgaagaagttctgcatatttctgataatgtgaagaaaaaactgccggaaggcgtgaagatgactaaataccacgtcaacttcatgggtggtgacctgggcaaagatctgactcaggcatgggctgtggcgatggcgctgggcgtggaagacaaagtgactgttccgctgtttgaaggcgtacagaaaacccagaccattcgttctgcttctgatatccgcgatgtatttatcaacgcaggtattaaaggtgaagagtacgacgcggcgtggaacagcttcgtggtgaaatctctggtcgctcagcaggaaaaagctgcagctgacgtgcaattgcgtggcgttccggcgatgtttgttaacggtaaatatcagctgaatccgcagggtatggataccagcaatatggatgtttttgttcagcagtatgctgatacagtgaaatatctgtccgagaaaaaataattcaatgtaaattacataaagcccgtgaatattcacgggctttttttattatttaataaatataaatacattctgataatgcatcctgccgctggacattatttcagcataagtggatattcaaagttttgctgttttatcagggaatatttatatgatacgtaagtcagctacaggtgttattgttgcgttagccgtaatctggggtggtggcacatggtacacaggtacgcaaattcagcctggtgtcgaaaaatttattaaagattttaacgatgctaaaaagaaaggtgaacatgcctacgatatgacgttaagttatcaaaattttgacaaaggcttttttaattcccgttttcaaatgcaaatgacattcgataacggtgcacccgatctcaatatcaagccaggccagaaagttgtatttgatgtggatgttgagcacggtccgttgcccatcacaatgttaatgcatggtaatgtcatcccagcactggcagcggcaaaagtgaacttagtgaataatgaactgacacaaccgctatttatcgccgcgaaaaataaatcgcccgtggaagcgacattgcgattcgcgtttggtggctcattctctacgacattagatgttgcccctgcagagtatggaaagttttcttttggtgagggccagtttacttttaatggtgatggtagttcattgtctaacctggatattgaaggcaaagtcgaagatattgttctgcaattatcaccaatgaacaaagtaacggcaaaaagttttaccattgattctctggcgcgattagaagaaaagaaatttccggttggtgaaagcgagtcgaaatttaatcagattaacattatcaatcacggggaagacgttgcccaaatcgatgctttcgttgcaaaaaccaggctggatcgcgttaaagacaaagattatatcaatgtcaatctcacctacgaacttgataagttaacaaaagggaatcagcaactcggtagtggtgagtggtcattgattgctgaatctattgatccctcagcagtgcgccaatttatcatccagtataacattgcgatgcagaagcagcttgctgcacaccctgagttagcaaacgatgaagttgctctgcaagaagtgaatgctgcattgttcaaagagtatttaccgttattacaaaaaagtgagccgaccattaaacaaccggtaagatggaagaacgcactcggcgaactaaatgccaatctggatatcagtattgccgacccagccaaatcttcatcatccacaaacaaagatatcaaatcgctcaattttgatgtgaagttaccgcttaatgtcgtcacagaaaccgcaaaacagcttaatttatctgaaggaatggatgcggaaaaagcgcaaaagcaggctgataaacaaatcagcgggatgatgacattaggtcagatgtttcagttaatcacgattgacaacaataccgcctcgctgcagctgcgttatacaccgggtaaagttgtttttaacggacaggagatgagcgaagaagaatttatgtctcgtgccggacgttttgttcattaaaatactcactcgcctctgctcattcagaggcgagtaaaacttacttattctgacgctgtgatgacatgagagacgtcagaagccggtctttttcctgccacaatgagttcagccattgctgaaaatggcgcttaaagcttttgtcattgatgtagtcgccatgtaactcatcggcaataggctgtaaatccacatgtacgacaatccgcgtcagtttaccgcttaacatatcgaagaacggctgacggttattgtccggataacacagcgtaacattaagcagtttatcgaattgtttacccagtacatttagcgccatcgcaatgcctgccgcctttggtggcaacaagttttgaaaagtggagtgggtttgctgatgtttttcttgcgtgaaacgggagccttcaacgaaattgacaatggtggtgggatgcaggcgaaacttttcacaagaacgccgagtggtttcaacatctttaccacgtcgctccggatgacgtaataaataagcgcgggaataacgcttcataaacggcatatccagcgaccagcacgccaggccaagaaatggcacccaggccagctgttgcttgaggaaatatttattcatcggaatgtgcttacgaaacagcacgcacagtacgacaatatctgcccaactacggtggttacaaataagcagataccagttcttcttacttaacccttccagcccgtgaacttcccattgaaggtgtgggttcagatgcagtaataccgccagaccttcacaccagcaatacatcataaaatcacaaaaacgcgaaacctttcgccaaatgactggcacaggtagcaatagttttacaatcccggcaatgatgatcgggacggaacaaaaaatagtgaccaaaatggtcaatacgatactcagcaaaagggttatcgcagcgagtattctcgtcataatgaatttattcaaaaggttagccatagacagtgcgctaaagaagcgcaaggcgcagattttagcagaaaacgacccaaataacggatgatccttaaggagaaaaataattcatatctatccacattagaaaaaatcccattatctcaattattagggatggatttatttttaactgcatgaaaaacaaagacaaacatcatgctgtaaaaagcatgataataaattaaaagcgatgtaaataatttatgcacaaagttatccacatgacgatttgcgagcgatccagaagatctacaaaagattttcacgaaaagcggtgaaaaactcatgttttcatcctgtctgtggcatcctttacccataatctgataaacaggcacggacattatggttcagatcccccaaaatccacttatccttgtagatggttcatcttatctttatcgcgcatatcacgcgtttcccccgctgactaacagcgcaggcgagccgaccggtgcgatgtatggtgtcctcaacatgctgcgcagtctgatcatgcaatataaaccgacgcatgcagcggtggtctttgacgccaagggaaaaacctttcgtgatgaactgtttgaacattacaaatcacatcgcccgccaatgccggacgatctgcgtgcacaaatcgaacccttgcacgcgatggttaaagcgatgggactgccgctgctggcggtttctggcgtagaagcggacgacgttatcggtactctggcgcgcgaagccgaaaaagccgggcgtccggtgctgatcagcactggcgataaagatatggcgcagctggtgacgccaaatattacgcttatcaataccatgacgaataccatcctcggaccggaagaggtggtgaataagtacggcgtgccgccagaactgatcatcgatttcctggcgctgatgggtgactcctctgataacattcctggcgtaccgggcgtcggtgaaaaaaccgcgcaggcattgctgcaaggtcttggcggactggatacgctgtatgccgagccagaaaaaattgctgggttgagcttccgtggcgcgaaaacaatggcagcgaagctcgagcaaaacaaagaagttgcttatctctcataccagctggcgacgattaaaaccgacgttgaactggagctgacctgtgaacaactggaagtgcagcaaccggcagcggaagagttgttggggctgttcaaaaagtatgagttcaaacgctggactgctgatgtcgaagcgggcaaatggttacaggccaaaggggcaaaaccagccgcgaagccacaggaaaccagtgttgcagacgaagcaccagaagtgacggcaacggtgatttcttatgacaactacgtcaccatccttgatgaagaaacactgaaagcgtggattgcgaagctggaaaaagcgccggtatttgcatttgataccgaaaccgacagccttgataacatctctgctaacctggtcgggctttcttttgctatcgagccaggcgtagcggcatatattccggttgctcatgattatcttgatgcgcccgatcaaatctctcgcgagcgtgcactcgagttgctaaaaccgctgctggaagatgaaaaggcgctgaaggtcgggcaaaacctgaaatacgatcgcggtattctggcgaactacggcattgaactgcgtgggattgcgtttgataccatgctggagtcctacattctcaatagcgttgccgggcgtcacgatatggacagcctcgcggaacgttggttgaagcacaaaaccatcacttttgaagagattgctggtaaaggcaaaaatcaactgacctttaaccagattgccctcgaagaagccggacgttacgccgccgaagatgcagatgtcaccttgcagttgcatctgaaaatgtggccggatctgcaaaaacacaaagggccgttgaacgtcttcgagaatatcgaaatgccgctggtgccggtgctttcacgcattgaacgtaacggtgtgaagatcgatccgaaagtgctgcacaatcattctgaagagctcacccttcgtctggctgagctggaaaagaaagcgcatgaaattgcaggtgaggaatttaacctttcttccaccaagcagttacaaaccattctctttgaaaaacagggcattaaaccgctgaagaaaacgccgggtggcgcgccgtcaacgtcggaagaggtactggaagaactggcgctggactatccgttgccaaaagtgattctggagtatcgtggtctggcgaagctgaaatcgacctacaccgacaagctgccgctgatgatcaacccgaaaaccgggcgtgtgcatacctcttatcaccaggcagtaactgcaacgggacgtttatcgtcaaccgatcctaacctgcaaaacattccggtgcgtaacgaagaaggtcgtcgtatccgccaggcgtttattgcgccagaggattatgtgattgtctcagcggactactcgcagattgaactgcgcattatggcgcatctttcgcgtgacaaaggcttgctgaccgcattcgcggaaggaaaagatatccaccgggcaacggcggcagaagtgtttggtttgccactggaaaccgtcaccagcgagcaacgccgtagcgcgaaagcgatcaactttggtctgatttatggcatgagtgctttcggtctggcgcggcaattgaacattccacgtaaagaagcgcagaagtacatggacctttacttcgaacgctaccctggcgtgctggagtatatggaacgcacccgtgctcaggcgaaagagcagggctacgttgaaacgctggacggacgccgtctgtatctgccggatatcaaatccagcaatggtgctcgtcgtgcagcggctgaacgtgcagccattaacgcgccaatgcagggaaccgccgccgacattatcaaacgggcgatgattgccgttgatgcgtggttacaggctgagcaaccgcgtgtacgtatgatcatgcaggtacacgatgaactggtatttgaagttcataaagatgatgttgatgccgtcgcgaagcagattcatcaactgatggaaaactgtacccgtctggatgtgccgttgctggtggaagtggggagtggcgaaaactgggatcaggcgcactaagattcgcctgaacatgccttttttcgtaagtaagcaacataagctgtcacgttttgtgatggctattagaaattcctatgcaacaactgaaaaaaaattacaaaaagtgctttctgaactgaacaaaaaagagtaaagttagtcgcgtagggtacagaggtaagatgttctatctttcagaccttttacttcacgtaatcggatttggctgaatattttagccgccccagtcagtaatgactggggcgttttttattgggcgaaagaaaagatccgtaatgcctgatgcgctatgtttatcaggccaacggtagaattgtaatctattgaatttacgggccggatacgccacatccggcacaagcattaaggcaagaaaattattcgccgtcctgcgtttcttctacaggctgcatctcgctaaaccaggtatccagtttctgccgcagcttgtccacgccttgtttcttcaacgaagaaaacgtttcaacctgcacatcaccgttaaacgccagtacagcttcacgcaccatattcaattgcgctttacgtgcgccgcttgccagtttgtccgctttggtcagcagcaccagaacggcgatattgctgtctaccgcccactcaatcatctgctgatccaaatctttcagcggatggcgaatatccattagcaccaccagaccttgcaggctctgacgtttttcgaggtattcgccgagcgcacgctgccatttgcgcttcatctcttccgggacttccgcataaccgtacccaggcaagtcaaccagacgcttgccgtcagccacttcaaacaggttgataagctgggtgcgccctggggtttttgaggtacgagccaggcttttctggttagtcagcgtgttcagcgcgctggatttacctgcgttggaacggcctgcaaaagccacttcaattccggtatcggaaggtaggtggcgaatatcaggcgcactcatcacaaaatgcgtctgttgataattcaaattagtcaaagcggtcgtctccgtcagtcaaagctttgtggcgattatacctgaaccataataaaaggcggatttttcggcgtgagcgttgtaagtaaaagccatacgctttgtgagacattgccgatagtctttatgcgaaatagcagagaaaattctgcgatgcatgtcaaataagctatataaatcagtgaattgcttttatataaaactctgaaaatgtgcaaatactgatggcggttgattgtttgtttaaagcaaaggcgtaaagtagcacccatagagcgaggacgctaacaggaacaatgactcaggatgagggtcaggagcgccaggaggcgaagacagaggattgtcaggaagacaaacgtccggagacgtaattaaacggaaatggaatcaacacggattgttccggctaaaggaaaaacagggtgtgttggcggcctgcaaggattgtaagacccgttaagggttatgagtcaggaaaaaaggcgacagagtaatctgtcgccttttttctttgcttgctttctgttagattccgccgcaaatctatactgaataaaacggctaaaagacgaaccattatgaaaccatcatcttcaaactcacgcagcaaaggtcatgcaaaagcgcgtcgaaaaacacgcgaggagctggatcaggaagctcgtgatcgcaagcgtcagaaaaaacgtcgtggtcatgcgccgggcagccgcgcagcgggcggaaacaccacgtcaggcagcaaaggccagaacgcaccaaaagatccacgtattggcagtaaaacccctattccattgggcgtgactgaaaaagtcaccaaacagcacaaaccgaagagtgagaaacctatgctttcaccgcaggcggagttggaattactggaaacggatgagcgtctggatgcgctgctggaacgtctggaagcaggcgaaaccctgagtgccgaagagcaatcctgggtggatgctaaactggatcgtattgatgagttgatgcagaaactcggcctctcttatgacgatgacgaagaagaggaagaagacgagaagcaagaagacatgatgcgtctgctgcggggcaactaacggattgccgccgtgggccttcccgttctgctgataacccttccggttatatgttatctggtgtggttattcgttaaactacagcggttgtcgcggcgacaaaagtggctgcgcaaccggctgatgacccgaaacgggcatccgccggtacgccgtagccgccagagacgccatcggaaggagtgagcatgtctgtacagcaaatcgactgggatctggccctgatccagaaatataactattccgggccacgatacacctcgtacccgaccgcgctggagttttcagaagacttcggcgaacaggcgtttttacaagccgtggcgcgctatcctgagcgtccattatctctctacgtacatatcccgttctgccataagctttgttacttctgcggttgcaataagattgttactcgccagcagcacaaggccgatcagtatctggacgcgctggagcaagaaatcgtccatcgtgcaccgctgttcgccgggcgtcacgtcagccaattgcactggggcggcggaacgccgacgtatctgaataaagcgcaaatcagccgcctgatgaagctgctgcgcgaaaacttccagttcaatgccgatgcggagatttcgatcgaagtcgatccgcgggaaatcgaactggatgtactcgatcatttacgcgccgaaggctttaatcgcctgagcatgggcgtgcaggacttcaacaaagaagtgcaacgtctggttaaccgcgagcaggatgaagagttcatctttgcactgcttaaccatgcgcgtgagattggttttacctccaccaacatcgacctgatttacggcctgccgaaacagacgccggagagtttcgcctttaccctgaaacgtgtggcggagctgaaccccgatcgtctgagtgtctttaactacgcgcatctgccgaccatttttgctgctcagcgcaaaatcaaagatgctgacctgccgagtccgcagcaaaaactcgatatcctgcaggaaaccatcgccttcctgacgcaatcgggctatcagtttatcggtatggatcactttgcccgtccggatgacgagctggcggtggcccagcgtgaaggcgtgctgcatcgtaacttccagggctacaccactcagggcgataccgatctgctggggatgggcgtttccgccatcagcatgattggcgactgctacgcgcagaaccagaaagagttgaagcagtactatcagcaagtggatgaacaaggcaatgcgctgtggcgtggtattgcgctaacgcgtgatgactgtattcgccgcgatgtgattaagtcgctcatctgcaacttccgtctggattacgcccctattgagaaacagtgggatttgcacttcgctgattactttgcggaagatctcaagctgctcgccccgttagcaaaagatgggctggtggatgtggatgagaagggaatacaggtgacggcgaaaggtcgcttgctgatccgcaacatttgcatgtgctttgatacctatctgcgccagaaagcgcggatgcagcagttctctcgggtgatttaaatagtgaatggcgcttcgtttacaaagtagaaaacgaaagcgccatcaatgtgctgagaacaagattgcctgatgcgctgggcaacaaaacctgttgaaattattgcttttgtaggccggataaggcgtttacgccgcatcaggcatctgagcatgatgcctgatgcggcgctggtcgcgtcttatcaggcctacgactttctccgcatccggcataaacaacgagcttcagctaaacagcccaatcattgcggcacacagcacggcagcaacggcagtttgcggtgtgtggctgtcaactgcgccactcgataccagattaattattgattccagcataatgactctccccgttttccgggcaagatcatactgaacttatcggaacagtaaagcgtaaaataccagcaatttgcgctcaataatcaatctttacacacaagctgtgaatcactccatccccagctcttttaacttacgcgtcagggtgttgcggccccagccgagtagccgcgccgcttcctgtttatgcccctgcgtatgtcgcaacgcggtcgtcagtaacgtccgctccagctctggctgcgcttcggaaagcagattttgatgaccggaacgcagcgctctgtctgcccactgcgcaagaagcgtcgcccagctgtccggttgcatttgcgaagtactctccgcaaccgttgattcaaacagttcgccgggcaaatcctgaatcaacacttcctgcccggcggccatcaccgttagccagcggcaggtgttttccagctggcgcacgttgcctggccacgccagacgcgtcagagcagcttcggtttccggatgcagtaacttcgcttctacgcccagttcgcgcgcggcaacctgtaaaaaatggcgcgccagacggggaatatcttcccgacgttcgcgcagcggcggcagatgaacgcggataacgttcaggcggtggaacagatcctcacggaacttaccttcctgcactcgctgttcgagattctggtgagtggcagcgataatccgcacatccactttcaccggcgcatagccgccaacgcggtaaaactgaccgtctgccagcacgcgcagcaaacgcgtctgcacatccagcggcatatcaccaatttcgtcgaggaataatgtaccgccatcggcctgttcaaaacgcccctgacgaatggtattcgcgccagtaaacgcgcctttctcgtggccaaacagttctgattcgatcaaatcttttgggatagctgccatattcagcgcgataaacggcgctttggcgcgcggactgtggcgatgcagggcatgagcgaccagttctttaccggtgccggattcgccgttaatcagcacgctaatagaagaacgcgaaagccgaccgataatacggaacacgtcctgcatggctggcgcttcgccgatgatatcggtcgttgggccgttaagctgaacattacgcggctgctgctgttcctggtaatgactgatagcgcgctcaaccagcgccactgcttcgtcgatatcaaacggtttgggcagataatcaaacgccccttgttgataggcgctgacggcagcatccagatcggaatgtgcggtcataatgatgaccggaagcattggatggcgctgtttaatctgcttgagcagcgccagcccgtccattcccggcatacggatatctgaaagcagcacatccggcgttttgctcgccagcgcctccagcacttctgcgccgttctcaaacgtcgtacaggttaaacctgccccagcgagcgcacgttcaagcacccaacggatggaactatcgtcatcgactacccagactatccctcgttgcataaacgtcacctttatttcctgataggcaggtaaaccgagaactcggtatgccctggccaactggtaaattcaattttgcctgaatgctgatcaatcaaattacgagcgatggataagccaagcccggtgccaccttcgcggccgctgaccatcgggtaaaacagcgtatcctgcaaatgaggcggaatgcccggcccgttatcttccacatcaatccgcgccgccagccggtagcgctcgccgtgtaaggtcagttgaaacgcggtgcgggtacgcagaatgatttcaccgccttccggccccagcgcctgtagcgcattgcgcacaatattcagcaagacctgttcaatttgatccgggtcgtgcgccagttccggtaggctgggatcgtaatcacgaatcaaccgcacgttgtccggcagttccatcgacaccagcgttaccacgcgttcagccactttgtgaatactttcggtaacgcgcgtaccgggcagctgcggccccaacagacggtcgaccagatttcgcagccggtccgcctgttcgataatcactttggtatattcgagtagtgatgggtcaggtaacgctttgctgagcagctgcgccgcgccacgtaaaccgccaagcggatttttaatctcatgtgccaggccgcgcactaaatcacgggcagcaacctgctgggcgtgctgtagctgttcctgacttaagcggcgctggttatccatcggagccatctccagcaggatcatgccgtccggcatacgctgggccgtcacagaaaggatatgcgagcgcccgtcgatgaccagcgtcacttcgttatcggtaaaaccttgccccgcctccagactttcttgcatcagctcgatatttaatgagaagtagctcaacagttccggtaacggtgtaccaaacaatttgcgggagctttgggcgagcagttgttgcgcggcagggttggcgtaatggatcgccaggttgtcatcgattaacaaaatactgttaatcagcgagttgaggatctgcccagcatcgggctgcgtgcctgttgccataaagcagtctcctgaacaggttgcaccattttagtgcattatagctttttacggataaaaagcgcgaagcatcagagaattgacggagaaaaaagcccatgcagagatgggctacagatagctgacaaacttcacgttggagagcgactcacctgctccggcctaccacatcatcaccgtgtaggccggataagacgcatttgcgtcgcatccggcgtgatgtgcttgccaccgatcccaggcctgccagagacaggcgaaaagtttccacggcaactaaaacacttagacgctgtagtacagctcaaactctaccggatgcggagtcatacgcacgcggtcatcttcttcgcgacgcagagcgatgtacgcatcaattgcttcgtcagtgaacacgccaccggctttcaggaactcgcggtccagatccagttcgttcagtgcttcttccagagagcctgcaacctgtgggatctctttcgcttcttctggcggcaggtcatacaggtttttgtccatggcttcgcccggatggatcttgttcttgataccatcaagaccggccatcagcagggcagcaaagcacaggtacgggttagctgccggatccgggaaacgtacttcgatacgacgtgctttcggagaagaaaccaccggaatacggatagacgcagaacggttacgcgcagagtaagccagcattaccggtgcttcatagcccgggaccagacgcttataagagttggtggtcgggtttgccagggcgttaatcgctttagcgtgtttgattacgccgccaatgtagtacagcgcctgctcagacagacctgcgtatttgtcgcctgcgaacaggttaacgccgtttttagacagagacatgtggcagtgcataccggagccgttatcaccgaacatcggttttggcataaaggtcgcggttttaccgaagcggtgcgctacgttgtgcacaacatatttgtagatctgaatttcgtcagcttttttggtcatggtattgaagcgggtagccacttcgttctgaccagcagtcgctacttcgtggtgatgggcttcaaccaccagacccatctgttccatcaccagacacatttcagaacgaatatcctgagccgagtctaccggtggaaccgggaagtaaccgcctttcactgccggacggtgacctttgttaccaccttcgtattgggtggaggagttccatgcgccttcgatatcgtcgatagcaacgtgggaaccggagatagatgatccgaaacggatgtcatcgaacaggaagaattcaggttctggcccgaacagtacggtgtcggcaatgccagtggaacgcaggtaatcttcggcgcgcttcgcaatggagcgcgggtcacggtcatagccttgcagggtgccaggttcaaggatgtcgcaacggataatcagggtggagtcggcgaagaacgggtcaatcactgcggtggatgcgtctggcatcagcaccatgtcggactcgttaatgcctttccagccgccaatcgaggagccgtcaaacattttgccttcttcgaagaattcagcattcacctgatgagcagggatagtgacgtgctgttctttacctttagtatcggtgaagcgcaaatcaacaaacttcacttcgtgctcgttcagcatcgtcagtacgtgttcagcggacatactttaactctcctggattggtcatggtcgtcgtggtaacgaaatctgcaattattttggccgtgtcgccgtaaaaaagataaagcgaaatctgtgccaacttttaaattgcccctaaaaggcgttatcatgcgcaccatcgtgcaaaagggctgcaccacgatgtgaatgttgcaccaatatagtgcttcaatggaaacattaagcaccatgttggtgcaatgacctttggataaccctttttatgctccgtgaaagcgatcacaaagggactctgcaatacttgtttgcggaggatgtttgtgatcctgttttgtagtgcgattaatccgtgtacaataacgcgctatttctaatgcctgaggcaaagttgtgatcgaaaaattgcgtaatatcgccatcatcgcgcacgtagaccatggtaaaaccaccctggtagacaagctgctccaacaatccggtacgttcgactctcgtgccgaaacccaagagcgcgtgatggactccaacgatttggagaaagagcgtgggattaccatcctcgcgaaaaacaccgctatcaaatggaatgattaccgtatcaacatcgttgataccccggggcacgccgacttcggtggtgaagttgaacgtgtaatgtccatggtagactcagtgctgctggtggttgacgcatttgacggcccgatgccgcaaacgcgcttcgtaaccaaaaaagcgtttgcttacggcctgaagccgattgttgttatcaacaaagttgaccgccctggcgcgcgtcctgattgggttgtggatcaggtattcgatctgttcgttaacctcgacgcgaccgacgagcagctggacttcccgatcgtttacgcttctgcgctgaacggtatcgcgggtctggaccacgaagatatggcggaagacatgaccccgctgtaccaggcgattgttgaccacgttcctgcgccggacgttgaccttgacggtccgttccagatgcagatttctcagctcgattacaacagctatgttggcgttatcggcattggccgcatcaagcgcggtaaagtgaagccgaaccagcaggtcactatcatcgatagcgaaggcaaaacccgcaacgcgaaagtcggtaaagtgctgggccacctcggtctggaacgtatcgaaaccgatctggcggaagctggcgatatcgttgcgatcacgggccttggcgaactgaacatttctgacaccgtttgcgacacgcaaaacgttgaagcgctgccggcactctccgttgatgagccgaccgtttctatgttcttctgcgttaacacctcgccgttctgcggtaaagaaggtaagttcgtaacgtctcgtcagatcctggatcgtctgaacaaagaactggtacacaacgttgcgctgcgcgtagaagaaaccgaagacgccgatgcgttccgcgtttctggtcgtggcgaactgcacctgtctgttctgatcgaaaacatgcgtcgtgaaggtttcgaactggcggtatcccgtccgaaagttatcttccgtgaaatcgacggtcgtaaacaagagccgtatgaaaacgtgactctggacgttgaagaacagcatcagggttctgtaatgcaggcgctgggcgaacgtaaaggcgacctgaaaaacatgaatccagacggtaaaggccgcgtacgtctcgactacgtgatcccaagccgtggtctgattggcttccgttctgagttcatgaccatgacttccggtactggtctgctgtactccaccttcagccactacgacgacgtacgtccgggtgaagtgggtcagcgtcagaacggcgtactgatctctaacggtcagggtaaagcggtcgcgttcgcgctgttcggtctgcaggatcgcggtaagctgttcctcggtcacggtgcagaagtttacgaaggtcagattatcggtattcatagccgctctaacgacctgactgtaaactgcctgaccggtaagaaactgaccaacatgcgtgcttccggtactgacgaagccgttgttctggttccgcctatccgcatgactctggaacaagctctggagttcatcgatgatgacgaactggtagaagtgactccgacctctatccgtattcgtaaacgtcacctgacggaaaacgatcgtcgccgcgccaaccgcgcaccgaaagacgattaatttcgttttttagtcataaaaaacctgccagcgatggcaggtttttttttgcctgtcgtgagcgcacaccaatgcgagtatctcccttataagtctgtggttacgtcaatagagagctttgtcacaattatctgcaaagtcatacgccgttaattgctttcttttttggcgtaagcgtaagatgcttcatctggtttaaaccaaaaggattaaacaatggcggagaatcaatccaccgtagaaaatgcaaaagagaaactggatcggtggttgaaagatggcatcaccacgccgggtggaaaactcccttcagaaagagagctgggagaactgctgggcattaaacgtatgacgctgcgccaggcgttgttgaacctcgaggcagaatccaaaatcttccgtaaggatcgtaaggggtggttcgtgacccagccgcgatttaattacagtccggagctgtcggcgagctttcagcgggccgcaattgagcaagggcgagagccttcctgggggtttaccgagaaaaaccgtaccagcgatattcccgagacgctcgcgccactgattgcagtgacgccatcaactgaactctatcgcatcaccggctggggggcgctggaaggacataaagttttctatcacgaaacatatattaatcctgaagttgctccgggctttattgaacaacttgaaaaccactcattttctgcagtctgggaaaagtgctaccaaaaagagacggtagtaaaaaaattgattttcaaacccgtcagaatgccgggcgatatcagcaagtatcttggcggttctgcgggtatgccagcgatcttaattgaaaagcatcgcgccgaccagcaaggcaatattgtccaaatagatattgaatattggcgatttgaggccgtagacctcatcattaatctgtaggtgttttatggtgacaataaataacgcaagaaagattctacaacgtgtcgacactcttcctctttatttacatgcttatgcctttcatttaaatatgcggctggaaagagtgttgcctgctgatttacttgatatcgcaagtgaaaataatctacgtggcgtcaaaatccatgttctcgatggcgagcgtttttctcttggtaatatggacgataaagaactctctgcctttggggataaagcccgccgtctgaaccttgatattcatattgaaaccagcgcctcagataaggcatctattgacgaagccgtcgccatcgcgttgaaaactggggcatcgtccgtacgtttttatccacgttatgaaggtaatttgcgcgacgtattatcgattatcgctaacgacattgcctatgtacgggaaacgtatcaggacagcggcctgacttttacgatcgagcagcatgaagatttaaaaagtcatgagctggtgtcgctggtcaaagaaagtgagatggaatctctttccttactgtttgattttgcgaacatgatcaatgcaaatgagcatcccatcgacgctttaaaaacgatggcaccgcatattacccaggtccatatcaaagatgccttgatcgttaaagaaccgggtggcctgggtcataaagcctgtatttcaggtcagggtgatatgccgttcaaagcgttattaacgcaccttatctgcctgggtgatgatgagccgcaggtgacggcatatggcctggaagaagaggttgattactatgcgccggcgttccgctttgaagacgaagatgataatccgtggatcccttatcgccagatgagtgaaacaccattgccagaaaatcatttactggatgcgcggttacgtaaagaaaaagaagatgcaattaatcagataaatcatgtgcgtaacgtactacaacaaatcaaacaagaggcaaaccatcttctgaaccactaataagttttaactcatacgcagttaataaaaccattccatatgaatggtcggtatcttattgcctttaaaacagtgattttaaaaatcgcttaggggatgttatgctcacgaaaaagaaatgggcgttatttagtctattaacactgtgtggcggtacaatttataaattaccgtcgctgaaagatgcgttttatatcccgatgcaggaatatttccatttgaccaatggtcaaattggtaatgctatgtcggtaaactcatttgtcaccacagtgggcttttttctgtctatttattttgccgataaactaccgcgcagatacaccatgtcattctcactcattgcgacaggattactgggtgtttatttgacgacaatgccggggtattggggcatcctctttgtctgggcgctatttggcgttacttgcgacatgatgaactggccggtcttgctcaagtcggtaagtcgattgggcaatagcgaacaacaaggtcggttgtttggcttcttcgaaacagggcgtggcattgtcgataccgtggtggcattttctgcgttggcagtatttacctggtttggcagtggcttattaggttttaaagcaggcatctggttctattcccttattgtgattgccgtaggcattattattttctttgtcctgaatgacaaagaagaggcaccgtccgttgaggtgaaaaaagaagacggagcatcgaaaaacaccagtatgacctcggtgctgaaagacaaaactatctggcttatcgcttttaacgtcttcttcgtttacgcggtttactgtggcctgacattcttcattccattcctgaaaaacatctatctattgcccgttgcgctggtgggggcttacggcatcattaaccaatactgtctgaaaatgattggtggaccgattggtggcatgatttcagataagatcctgaaatcgccaagtaaatatctatgctacacctttatcattagtaccgctgcgctcgtactgttgattatgctgccgcacgaaagtatgccggtctatttagggatggcatgtacgctgggctttggcgcgatagtctttacacagcgagccgtattttttgcacctatcggcgaagcaaaaattgctgaaaataaaacaggtgcggcgatggcgttgggtagctttattggttacgctccggcgatgttctgcttcagtctgtatggctacattctggatttaaatccggggattattggctacaaaatcgtgtttggcattatggcctgcttcgcattcagtggtgcggtggtttccgtaatgctggttaagcgtattagccaacgtaagaaagagatgctggcggctgaagcttaattaatggccggatgtgcttaatccggccaacgaaaaccgtatcaaccgtaggccggataaggcgtttacgccgcatccggcagtttcacatcagaagaaatacttcgtcccgatacggatctggttttgctcgcggtggtacggttcgacgttgcggtctaaccagcgcaattcgaaataagggagccagtgttcattaatacggtaacggaaggtgttagtgatttcccaatgatgatctttcccgttgctactattaaagtcattcactcgcatgaagtaatgtggctcaaatgtataggaaaatttatcggtgattttaaaattccagtaggtgccaatttcataggtgtcattattatccagttccccgctcaaatctgttgaactatagttattatggttatagcgatttcgtactgtcagattaaaccatggtacaaatttatagttgacgtccagatacactgcaccacccgaaccgatactcttatcattaattaagccaccgggctggatggttaatttatcggttggtttaaataacggataccagccttcaatttcgttatatccatgttttagttcatcttctcgctgaaagttgtaggtattggttaacataatacccgcgcccatatcgaagttataacccacacgtagcataacctcgccctgatcggaggcaagattatatgcctccctgttttcgacgtatgcgccagcaaataccgaggcagaggtcagagaagataataaaattattgcattaatctttttcataataagtccattttttaaacgtagggaggccgccacccaccaggatggaaatagcggctattgacatttataacgttacggaagccgttttttcttctgtcgccatctctttatttttgcgttggttgatttcctcaataatcaatgcaaaccgtttttcattgagtgtgtaaaagaatcccatcgtcaatgcagcaataattgccagtgcacaaggccagataaaaatgagctgacgcaaaccctgtaatgtcgcatcgctttgcgcgatgttgggaacataaccaatttgcgtcagcataatgcctggcaagaagccagcaagtgcggcagaaattttacgaaagaaggtataaccggtataaacagaaccttcggcacgaataccggttttccattcaccgtaatctacggtatctggtaccagtgcccagttcaggctgtttacaaaggccgtgccaaaaaaggcgacacaagagaacatgacgaaagtgaaagagttacttccccagaaataattcagtatatcacccaccgcccacagcaccatgccagccagataaacctgttttttaccaaaacattttacagttaatggcaccagtaatacgccgatgaggatgcatcccatactgaagaatcccatccacgacaataaattaatatcattcagcacatactgggtgtaatagacctgaatcgccagtttgatattaaatgccgccagggtacacaagttagcaatgcataaaaccagcaatggcggattccgaaatatcgcgcaaaatgatttgagaatactggctttatgtccggttggcgttgtgtccacataatgctctttgacgcctctgtagcacagcatcataaaaataaagccgccaatggagaacataagtgccgcacaggcataaccgacggttgagtcagaaaaaagcgactgcaacggaataaacgccacggtacaaatcaatagccctatggttgcaccaccctggcggtaagccgcgagctgcgcgcgctcattcgggtttttggtaattgccgggatcatcgcaccatacgagcagttcatcagactgtatgaaagtccaaacatcataaacagcgcggtggcaatcgtcgttttaaccggcaaacaaaaggtggtggcgataaactggagcgttgcaattaacgccgccggaaccgctgcatataaaataaagggacgaaatttgcctttaggcccaatatttttccgcgagtcgagtaaaaatccggtgagcatatcggtaaacgcggtaaaaaacttcgccaccagaaagataatcccgccatagtaagcaggcatccctaattcatcggtataaaatttgaggagatacagagtaccgatgcagagcattaaattcgaaccgacgtcgcccataccataggcgattttttcccgcagattcagttttaatgtcagtggattatggtcagacataatcactccttataacgccccgcagggcgtcgtttattattattacgccgtgcgtttacgggcttctatctcttccacaatgcggacatacatcttctcgttcaggctgtagaagcaacccatcgccacaatggtgactaccgccagtgcgcttgggtagatgaagatcaactggcgtaacccttcaatggtgtggtcagcctgtgcgacgttcggcacatagccaatttgcgtcagcatccagccggggaagaaaccagccagcgcctgagacactttgcgaaagaaggtaaaaccggtgtagaccgttccttccgaacgcacgccggtgcgccactcgccgtactcgacggtgtcggaaaccagcgcccagttcaggctgttaacaaacgctgagccaaagaacgccaggcaggagaacgccacgaagctgaccgaaccgccgccgaagaaatagttgagcagatcgcccagcacccaaatcagcaggccgccgatataaactttcttcttgccaaaacgtctgactgaggcaggcatcaggaatacgccgatgaaaatacagcccatgctgaaaaatcccatatacgacaacaggatgggatcgttaagcacgtactgggtgtaatagacctggatggcgagcttgacgttaaacgcccctaaagtgcagaggttggcaatgcacagaatgaacagcgggcggttacccgcaattgcgcggaaagattgcagcaggcccggcttttgcgccggattagcaggctgggtttcgacataacgctctttcacgcccgagtagcagatccacataaacagcaggccaaacagtgaaaacagcgtggcggcgaagatatagccaagttgctgattaccttcgataagattcataactggcacgaatcccaccgtgcacagcagcaggcccagcgtagcgccgccctgacgccatgccgccagtgaggcgcgttcgttggggtttttggtgatagcgggaaccattgcgccgtaggagcagttcatcatgctgaaaaacagtccgtaaagcataaacagaatagtggccatcaccgttttaccggtgacatcaaacggtgtgccgacaaagttggcgatcgccagtaaggtgaccgggaatgacgcatacagaataaaaggacggaacttaccttttggaccgatcttgcgtcgggaatccaacataatgccggtacccatatcggtaaacgcagtaaagaattttgaaatcaaaaagataatgccgccataggtgcctggcagccccagaacgtcggtataaaacttcaaaagataaagcgtaccgatatccagcaggatgttagaggccaggtcgccaataccgtaagagagtttctctttaaagggcaggcgtaaagttgctggatcttccgttgtgatgtgactcatcgatgttctccctttgcccatgagtttccccacgggcggatgtgattagatgctttttaacgacgcgaacagtgccgcccattcgctatcggcgcgataaaagaccggcggcttgccgatgggcgcattaacggtaacttccccgccccggaacgcttcacccgtccaggcgtggacccagttatcctccggcagatagagcgtccagtcgctacggccttcttcatgcaccggagcgaccagaatgtcgcgacctaacaggtactgatatttcagggtgtaagtgtgcgcatcgtcttcgtaatgcaggaacagcgggcgcataaccggcaggccggacttcgcattcagcgcgacggcctctttcaggtaaggtttcagggtggtgaagacggtggtcatacgggcgaaatgggcgatggtttctgcgtcgccgtcaaactgccagttgtcgccaggacggttaccttcgtgggtgcgcatcatcggcgtgaaggcgctgaaatcgcaccagcgcagcagcagctctttgctgcgcttcatctcaaacagggtggtgtaaccgccaatgtcgctgtggtgcaggccatgtccggtcattgccagcgacagcgccgccgggacaaccgacgccaggccatcgtcgagactccagtcgacgttctggtcgcccgcccacatcatggtggagtatttctggctaccggtagaaccggcgcgcataaagaaaaggatctcgccgagcttgcccgtttcttcaagggcttcgtagttacacttcgcccacagcgcaggccaggcgttatgcataatttcggcactgacgccgttatgcaagtacgtgtcggtgggcagatactcgccgaagtcagccatccagccgccgcagccgagttcaatcatgttctttttgatcacttccttgaaccaggcgtaggcttctggattagtgagatcgacaacgccgccgtaaaactcgccaaactccaccagatagtcaccgccagaggcatcttttgccagatagccgtgttgtgccgcttcttcgcagagatctttatcgctggcaacatacgggttgatataggccaggaactgcacgccctcctgattccactgcttaatgcgtgaatccagttgcgggtagttttcgctgttccacttccagttccacatcacgcgtttgccaaaagaggtcatacgaataccggaccagtcctgcgcccagatgccgttgaccttcacgcccgcgttacgcatggtgtccagtttcttctggcacacttccgtcccgccctgaatgccgagcgttactccgtcataaatccagtcgggcagttctggctggcgtcccagcagggcggttaatttttccagcagggaaatgtatgtgtcagcacattcaaaacgcagcgttgctttgtcttcccacagcgccagttcatggtattccggggcactaaagtcgaagttcatatagcaactgttatcaacatggcagtaatacttctgcgtgctgacaaacgtaggctgtgggaagaaagtccagtaatagtcgccgcccgcattttctttgcagtcggcctgccaggtgacataggtttgtttgttgcgaccaacgccttgttcactggtccatagcgggaacggtttgccacgcagatcgaagtaggaaaactgttcgccgcagccgtagatatggtcctctggttgagcggcaaggcgcagccagatacggttgtggttaaggttgtcgttttgtagttccagcaataaacgcccctgatcgtcggcagagatattcagcgtggcgctaatgtcagaaccacggctgaaatgaattaaccaaccatccggtgactggctgacgatggcgtcggtaagcgcaattttctcctgtagtttatctttaatgctgaaattaccgcggaacatatcgatatccgctatacctgagccaatccataaacaaggattatctttgctatgggttaaaataagacgttgttgaaaatgtagggtaaaactgtcgttattctgatgaaattgaaaatctaataactgtggacgtggcgtatccataactaatctccatagagttgagaacgagattgttgccttcctgttattacaggcttatgtaaaatgattctcataaaactgatatataaaaactttacagaagctgagctgggtgatgctgccaacttactgatttagtgtatgatggtgtttttgaggtgctccagtggcttctgtttctatcagctgtccctcctgttcagctactgacggggtggtgcgtaacggcaaaagcaccgccggacatcagcgctatctctgctctcactgccgtaaaacatggcaactgcagttcacttacaccgcttctcaacccggtacgcaccagaaaatcattgatatggccatgaatggcgttggatgccgggcaacagcccgcattatgggcgttggcctcaacacgattttacgtcacttaaaaaactcaggccgcagtcggtaacctcgcgcatacagccgggcagtgacgtcatcgtctgcgcggaaatggacgaacagtggggctatgtcggggctaaatcgcgccagcgctggctgttttacgcgtatgacagtctccggaagacggttgttgcgcacgtattcggtgaacgcactatggcgacgctggggcgtcttatgagcctgctgtcaccctttgacgtggtgatatggatgacggatggctggccgctgtatgaatcccgcctgaagggaaagctgcacgtaatcagcaagcgatatacgcagcgaattgagcggcataacctgaatctgaggcagcacctggcacggctgggacggaagtcgctgtcgttctcaaaatcggtggagctgcatgacaaagtcatcgggcattatctgaacataaaacactatcaataagttggagtcattaccgctgagctgtttttaacttaataaattgaagatacataatgttgcctttagcgagtgaaatgttcttcaatgattttgactgctaatcaatacaagttattttctctgtccgtaaatattaaaaaacaggcggtgcggttttcctgattccagtaataataagtcgatacctgaattaaaggcgttaggcgggcaactcataggttcaactgccagtccctgacgctgtaatttttcaccgctataaacctgcacccagagttgatcggaacaaaggcttaccgaaagcgcctgctgtggatgggtaatggtcatttcccacaaatcattagcggttttaaaggtgtggtcgatttttgtcgcggctatttttttcgcctgcgtgaaatttaaatccagctcatcaacgtggtgaagcgttgtcggattcgcgtgctcatcgacggcataaacctggtttgccggaagctggaacagatattcatcaacagatgttaagttgcaggttaaataaggatgaatacccacgccataaggcgctgcgacagtgccgatattctggcttgcgatctcaacggaaagacccgtgtgtgcgttgagcgaataaacaacttgtgaagccagcataaacggatagccgtaactgggcggcagaaaagctgtcagggtaacgctggtggcggttaattcactaatttgccagtctcgccaggcaagcagcccgtgaatagcggcttttgaactatgttcattaatgggtaactgatattcctgcccctgatagcggtaacagccgttggcgatccggttcggccacggaataagcactttacccagatgcgccagcggcatctcttcgggtttgtgcgggatgactaaatgacaaccctgaaaggttaattcagccagaccagcaccgacggtcacaatggtcgcgtgataatcccccgcggcaagtgaaacggtctgtccactgcaatgcatattggtgatttgcatacaaggcaccttaattaacgacatacagcctcccgtgaggctgatgtcaaacccaaaaactgcaccggacggtcccctcgcccctttggggagagggttagggagaggggaaaacccgcaccctattttcagatcagttatttcgcattaatatccagcagacccgctgcaaccgctggagccatgccgggcgctaacgggatacgcgggatcaccaggcaatgcagcaggtgataaatatcctgtttgccgtcccagactttggtggtgaccttattgtccgcatccagctcctgccaccaggaaccattttcatagtccatcaggtacttaatgcagtactcccaccatgtttgataccaggtttcatactggcgatcgccagtgacggtgtagagcgcgtaggccgtacccattgcttcgacgataggccaacgtacacgttcgcggaccaccggttttccttcccagtcaacggtataaacaatcccgtccgcgccatcgggtgcccaggcatcgcgcacggtggcgttaaacagacctttggcatcttctagcagccatgctggtggttgttcgcaacgggcttccagggcagcatggatgtgcagcattaaacggccccattcgatccagtggcctggtgtacctccgaacgcgcggaagcgatgcgccgggttatctttgttgtaatccggcagcggattccactgggtatcgaagtgttcgttaacgcgataatgattatttctggcgacgtcgtggataatcacggaagccacgcgaatcgcgcgatccagccattttttgtcgtgagtgacgtcataaacaatcaagaaagcttccaccgcgtgcatattggcattgccgccgcggtactcttcggttttgctgaaggcttcgtcccaggattccaggcacatctgctcttcttcgctccagaaatatttctcgataatttcaatggtgtaatcgagcagcttgcgcgcttccgggtgacccgttgtgacggcgctggcggcacccagcagagcaaagaagtgttgatagccctgtttggaggcatccaccacgccctcgtcattcacgcaggcataccagccgccatattttttatcacgcagtgcgccgttcatggctttgataccgtgatcaaccaacgagtaagcgccaggtcgacccatcgccgcagcaacggaataaacgtgcaacatacgagcggtgatccacagatgggtgcccatctcttctttgatttgccctttattgcctaaccagccaaaaccagtcggcactacggaatttttaccaaaatcaaagatgcggtcggtttcctgttccagccaacggttgtggcttagggtgttaaaccatttcattccttttatcctcatcttagcggcgtttagccatcatttcgtcgacgatatcgccaagttgttgtaatttcggtgcgcaaacgtcacgcagcatcagctcgttgtctggtaaaccgacgaccgatgcccagactgcacggcctgccaggaatcccgatgcgcccgccgtcattgccacgcgtacggcacgcgggaacagtttttcgtcgacaccggaagagaggatcacccatggcatattgatatggtcattcagacgttgtgaagcacagagaagctcttgttgcggacctttgccataaagcggcatttcaactttgtagaggtcagcgccactgtcgcccagctctttggcggcatcgatgatcgcttgttcgcgatcgaatttatcgccacgacgcggtgggcggacgactggctcaatgatgcttaccagaccgtgtgagtggcacagttcgttgaactctttcaccatatccagacgttgctgcgcatcttcatcactacgccacagcaccagcagttttaaggctttgccaccgtcttgtttgatctgtagcggattgattttgcggtcaataaccacgctatcgaccggaataccgttgccaggaatgaactcatcggcggcgacaatcatggcgcaacttttggcaatcgcgttttgctcaaccacctggcggtagcagaattgttgatctaccagaatcgccgaggcataaggcgagagggcctttgcagcgttaactttgaaatcagttaaaacgctatcggctaccggagcgggtgccccagccgcggcaaacatcatgcgcatggcttcgcgctgatcgaccgccagcatggcaaaaccgcccgatgcgcgcgtaatgtcgttgatggtgtacttattcattcatttattcctttatccagtcgttacatttttactttggcagtcatcccggcactgacacggacctgttccagaatggcggaccagtcctggcgaccgcgacccgctgcgcgcgcctggctataaacctcccgtgaggcggcccccagcggcattggcacatgcagctggttggcgacatcaagggcgatgccaagatccttatgggcaagatcgatcatgaaggcgggagaaagatctccgctgaggactttgtttggccaggaagtggtgaagtgacctttaccggcggcggtaccgctcatcactttgacggcaacatcgaagggaagattcagggcttcgcacaaaacggcggcttctgccgaaagcgcattgagcgcgatgctcatgtagttgttgatgagcttaacgcggatccccatgcccggaccgccagcgttgatcaactcactgcccatcgccatcaggatcggtgtggcacgttcaacttgttcagcggtgccgccagccagcagtaacagagtaccggtaatggcatttgcagaagtacggcctaccggaacatccatcatgctgaagcctttggcttgcatatcggcaatcaatttatcggtttgcagcggatggatggtggacatatcaatgaccagcgcatcggtagataagccttcgcaaacgccgttttcaccgaacaacacgttgcgcaccagatcgccattcggcaacatggtaatgataaattcggcatctttagcggcctgcgccgggttggcggcgggagtcgcacctttgtctaccagatgccgcacagcttcggcgttcacatcaaagacgcgaagttgatgcccttgctgcaataaattgctcgccattggcgaacccatttgtcctaaaccgataaacgcgattgctgccataaccctctcctgaatacagttatgtcactttttgtcatttatgacatgctttgcttgtctgtttttgatcgtatttgtaatttatcgtcaaaaaattgacagccgtcactttttaaacaattggtgaaattaaaatgaacgcatcccaaaatgtttaaggaatgaccatgattcgtgttgcttgtgtaggtataaccgtgatggatcgcatctattacgtggaagggttaccgacggagagcggtaaatacgtggcgagaaattatacggaagttggtggcgggccagcggcgacggcagcggttgcggcggcaaggctgggggcgcaggtcgattttattggtcgcgtaggtgatgacgacacgggcaacagcctgctggcagagctggaatcctggggcgttaacacccgttacaccaaacggtataaccaggcgaaatcttcgcaatccgccatcatggtggataccaaaggcgagcggataatcattaactaccccagcccggatctgctgcctgacgcagagtggttggaggaaattgatttctctcagtgggatgttgtgctggcagatgtacgctggcacgacggcgctaaaaaagccttcaccctggcccgtcaggcgggtgtgatgaccgttctggacggggacattacgccgcaggatatcagtgagctggtggcattaagcgatcacgcggccttttcagaaccgggtctggcgcgcttaacgggcgtgaaagagatggccagtgcgctaaaacaggcacaaacgctcacaaatggtcatgtctatgtgacccagggtagcgcaggctgcgactggctggaaaatggtgggcgtcagcatcaaccggccttcaaagttgatgtggtagataccacaggtgcgggtgatgtttttcacggcgctttggcggtggcgctggcaacaagtggggatttagcggagtcagtccgcttcgccagcggtgtagcggcgttaaaatgcacacgtcccggtggacgagccgggatccctgactgtgatcaaacccgatcttttttgtcactttttgtataaaatgccagggtgatggtttttcgaggaattttcatgagccttaccgaactaaccggtaacccgcggcacgaccaactcctcatgctgatcgccgagcgtgggtatatgaatattgatgagctggcaaatctgctggatgtctccacgcagacggtccgccgggatattcgtaaattaagcgagcaaggcctgattacgcgccatcacggtggcgcgggtcgggcttccagcgtcgttaatacggcgttcgagcagcgtgaggtttcgcaaaccgaggaaaaaaaagcgattgccgaagcggtggcagactatattcctgatggttcaacaatatttatcaccattggtacgactgttgagcatgttgcccgggcgttacttaaccataatcatttgcggataatcaccaacagcctgcgtgtggcgcatattctttaccacaacccgcgctttgaagtgatggtgcccggcggtacgttgcgctctcataatagcgggatcattggcccttcagcggcgtcctttgtggctgattttcgtgctgattatctggtaacaagcgttggggcgattgagagcgatggcgcgttgatggagtttgatgtaaacgaagctaacgtggtgaaaacgatgatggcgcacgcgagaaatattctgctggtcgccgatcacactaagtatcatgcttcggcggcggttgaaattggtaacgtggcacaggtcactgcgctctttaccgacgagctgccgcccgctgcgctaaaatcacgcttacaagacagccaaattgaaatcattcttccccaggaagacgcgtagatttttgtgaccgttaacctggcttcataccttgccacatagccaaacccatcctttcccgctacagttaatttcttgtggcgcgaaaggaggcaaaaatgctctatatctttgatttaggtaatgtgattgtcgatatcgactttaaccgtgtgctgggagcctggagcgatttaacgcgtattccgctggcatcgcttaagaagagttttcatatgggggaggcgtttcatcagcatgagcgtggggaaattagcgacgaagcgttcgcagaggcgctgtgtcatgagatggctctaccgctaagctacgagcagttctctcacggctggcaggcggtgtttgttgcgctgcgcccggaagtgatcgccatcatgcataaactgcgtgagcaggggcatcgcgtggtggtgctttccaataccaaccgcctgcataccaccttctggccggaagaatacccggaaattcgtgatgctgctgaccatatctatctgtcgcaagatctggggatgcgcaaacctgaagcacgaatttaccagcatgttttgcaggcggaaggtttttcacccagcgatacggtctttttcgacgataacgccgataatatagaaggagccaatcagctgggcattaccagtattctggtgaaagataaaaccaccatcccggactatttcgcgaaggtgttatgctaaaaaccattcaggacaaagccaggcaccgtacccgtccactatgggcctggctaaaactactctggcaacgcattgatgaggacaacatgacaaccctggcaggtaaccttgcctatgtgtcgttgctctcattagtgccgctggttgccgttgtttttgcgcttttcgccgcttttcccatgttttccgacgtcagcattcagttacgtcactttatttttgccaactttctgcctgctactggcgatgttattcagcggtatatcgaacaatttgttgccaattccaacaagatgaccgccgttggggcgtgcgggctgatcgtcaccgcgttattgttgatgtactccatcgatagcgcgttgaataccatctggcgcagtaaacgagcgcgaccaaaaatttactcgttcgccgtgtactggatgattttaacgctggggccgctgctggcaggggccagtctggcgatcagttcctatttgctctccctgcgctgggcgagcgatctcaatactgtcatcgacaacgtgctgcgtatttttccgttgctgttgtcgtggatctccttctggttgctgtacagcattgttcctaccatccgcgtacctaaccgcgacgcgattgtcggcgcgtttgtcgccgcactcctgttcgaagcaggaaagaaaggtttcgcgctttatatcaccatgttcccgtcatatcagctcatttatggtgtgctggcggtgatccccattctctttgtttgggtctactggacatggtgtatcgtcttgcttggcgcggaaattactgtcactctcggggaataccgcaaactaaaacaagcagctgaacaagaagaagacgacgaaccatgattgcattaattcaacgcgtaacccgtgccagcgtcaccgtggagggagaagtgacgggcgaaattggcgcgggacttttggtgttattgggtgtcgaaaaggatgacgacgaacagaaagcaaaccgtctgtgcgagcgtgtgctcggctaccgcatctttagcgatgccgaaggcaagatgaatctcaacgtgcaacaggcgggcggcagtgtgctggtggtttcccagtttaccctcgccgcagataccgaacgggggatgcgcccaagtttctccaaaggtgcatcaccggatcgcgcagaggcgttatatgactatttcgtcgaacgctgccgtcagcaagagatgaacacgcaaacaggacgcttcgctgcggatatgcaggtatcgctggtcaatgatggccccgtgacattctggttgcaggtatgagccagcttccagggttgtcacgggaaacaagagagagtatcgctatgtatcaccttcgggttccacaaacagaagaagaattagagcgttactatcagtttcgctgggaaatgttgcgtaagcccctgcatcaaccaaaaggttcggaacgcgacgcgtgggatgcgatggcgcatcaccagatggtcgtcgacgagcagggtaatctggtggcggtaggccgactgtatattaatgccgacaatgaagcgtccattcgctttatggccgttcatcccgacgtgcaggacaaagggttaggcacgctgatggcgatgaccctggagtcggtggcgcgtcaggaaggcgttaagcgcgtgacctgtagcgcccgtgaagacgcggtggagtttttcgccaagctggggtttgttaatcagggagaaatcaccacgccaaccaccacgccgattcgccattttttgatgattaagcccgtcgccactctggatgacattctgcatcgcggcgactggtgcgcgcagctgcaacaggcgtggtacgaacatatcccgcttagtgaaaaaatgggcgtgcgcattcagcaatataccgggcaaaaatttatcactaccatgccagaaaccggcaatcagaatccgcaccatacgctgtttgccgggagtttattctcactggcgacgctcactggttggggacttatctggctgatgctgcgtgaacgccacctcggcggaacgattattcttgcggatgcgcatatccgctacagcaagccgattagcggtaaacctcatgcggtagccgacctcggtgccttaagcggcgatctcgaccgtctggcgcgcggacgaaaagcacgggtgcagatgcaggtcgaaatctttggcgacgagacgccgggtgcagtgtttgaaggcacgtatatcgttctgcccgcgaagccatttggcccgtatgaagagggcgggaacgaagaagagtagctgatggagaggggcggtgctgcctctctcattcaggtcatttatattagtccttggctatttcggttatattaaataagaactctataaatttttattcttcgttggctccatacgtgtcttgctacatcactgttcaggagcatttaaatattatttgtagaactgagtggcaattatcgcagataatgcttaattcatcatcttagttcatgtttgagcgatttttgatagtcaaaaccccctctggtgccatacttttctcataaatatttttaaaatctatagctaacaaatattatgcaaagataatggactagcatcattgtcagtatcattcatttactgctctgtatgttatgaataattatgttgtatgtttgctcttaaaccgtgggaaggaggctataatggttgccaatattaatctcattaaacaagaaagttattctgttgttaatttagaaaaacaactttcccgaactgttaccaacaaaattataacgatgagcaagtaaagaccggttggtggcagtactgaccggtctgtgatgaaagattaatttcaccttaaatcctggtgctgttaggatgctgacgtttttcggctacaccattcagattatgcaaataaatatctctgaatataatatattcatagcacccataattcatcctgggcgataactaaaccatttttgagtaataaatgaaacaactgcaacactcttattatttctggaaaacgcctcgcaaaaacaaaacaacatgcaaaaatccgctttttttaaatgattttccggcgtaattttcgcacatacattaatgagtaatatatgtaaggtattggtaatggcgatgaatacggtttttcttcatttatcagaagaggcaattaaacggctgaacaagcttcggggctggcgtaaggtttcacgatctgcaattttacgcgaagcggtagagcaatatctggaacgtcagcaattcccggtgcgtaaagcaaagggaggcaggcaaaagggggaggtagttggtgttgatgatcagtgtaaggagcataaggaatgacaaaaatttttcattcttgaatataaaaaacagatgcccttattctggtattaatacaaggctgttttacttgaacttataataactgcaactgttacatcatatctggaaaacgcctcgcaaaaataaaaaatgatgcgtaaatgagctttctttaaagattcggcaagggtacttttctctccatagattcaaaaatgatattggcgagatatttatgaactctctggcaggtatagatatgggcagaattttactcgatttatcgaatgaggtgattaagcaacttgatgatctcgaggtgcagcgtaatcttcctcgtgcggacctattaagggaagcggtagatcaatacctgataaatcaatcgcaaacagcaagaaccagtgttcctggcatctggcaagggtgtgaggaagatggtgtcgaatatcagcgtaagctgcgcgaggaatggtaatgggaaaaaatgatgtcaatcagattgctgacaacgtgcgcgttgttcatgccggatgcggcgtgaacgccttatccggcctacaaagtcgtataaattcaatgtattgcagtttattggtaggcctgataagcgcagcgcatcaggcaatcttacgcttgtcatcagtctcatgcccataaccttattgatgtggtggtgggtaaattgaggccaaaccggcactggcggcatagcttgaggtggtaacgcggaatacgagagatggtgtcgtcacaccctatgagctgtaatccgggcgacctgcgccacccggaaaacgtcagagattactctccttcacccggaaacaggaacgggttgatggaactgcgggcatagccttcttgctccattcgtgcgtccagtaccagagaggcgaggtcatctgctacggcttcgatttttggatctttttcctgatagagaattttcaggtaagtgtcgcagtcatcgcagctttcggctttaatcgcggcctgttcgtcatccagcgaccagtaatgcagtttgccgctctgctcgcagttgctgcattttacgcgcactacgtgccattcagtttcacacaggttgcagtgcaggtaacgtagcccctgagtggtgccaatttgcaccatgctggacaccggcatagaaccacaaaccgggcaatattgacgttgctcgccgtattcagcgcgggctttgccggggatcagattggccatctgcgcccagtagagcgacagtgcagcccagataaacggcgctttatcgctgctgacggacgagaaatcagaggcaaacagcgcgctggccatatcttccagctcctgagtcgatgccttctccagattctcaatcactgccagcgccgggccgctcatttcaggtttcagctcagcaatcagcgccatcagcagcttttgccagtgcttatcacgcggcagaacgtgaatatccagcgggggcttgccttgtgcgctggcttctttaatgcgcgcagtcagatccatctccagcggatggtcgtacagcaccacttcctgggcgtgggcgataagcgcagcaaagcgcaggtaatcacccagaggattattttctgccagctcgcgcagacgctcggcgcggcggttgtataaattcttgagccgagggaacaataacggcggaatcatatccgccgtacgtttctcgcttgaacccagctcatcttgcgggattatgcgaatactcattcagctttcttttccgttgtcttgcggacctcacggtaccagcgcgggtgatgtttcttcgcccaggcgctggtaacccatccttccaccatggcggtaatcgtgcctttcacccaaagggcggcgtagatatgcaccatgataaccacaattaacgccactgcggcaaatgaatgcagcattaacgcgaatcggatcaccgggattgagaaagcaggcgcaaaataaggacgccagataatcacgccgctcaccagcagcagaaccaggaaaataatcgccgcccagaaaacgcatttctgaccgaagttataacgcccggtgtcacctacttcctcgttgacgacgatcttacgaatattcttcgcccaaaagatatcatcccgattgattaggttgtgatgccagtaacggaaaaacatgatgatgaacgaggcaaacataaccacgccgacaaacgggtgcagaattcgcgccagctgcggtgtgcccatgatttgcatcaaccagttgaaggacgggaacaaaaagcccagcccgctcaccgccgccaggatgaagcagaaggcggtgatccagtggttgatacgttccggcgcggtgtagcgcacgatggtgtcacgtcgtttcatttgcgctcctcgtctttctcttcgtgcagattattctcttcctcatccgcacggttcggaccgacacccacgtagtggaagatactggccgcaaaggtagccgcaaagccaacagccgcgagcggtttccagatgcctttccagaatttcacggtttcgctgatttccgggttctccggcaagccatgatacagatttggcttgtcagcatggtgcagcacgtacatgacgtgtgtaccaccgacgcctgccggatcgtacagacccgcattgtcgtaaccgcgggttttcagctcagcaacgcgctcgctcgccagcgttttcatcgactctttcgtaccgaagtgaatcgcgcccgttgggcaggtcttcacgcaggctggttcttgcccaaccaccacgcggtcaacgcacagcgtacatttgtagacgcggttgtcttccgggttgaggcgcggaatgtcgaacggacagcccgcaatgcaataaccgcagccaatgcactgctcggactggaagtcgacgataccgttggcatactgaataattgcaccttccgccgggcacgctttcaggcagcctggatcggaacagtgcatacagccgtctttgcggatcagccattccagtttgtcgttctgctccacttccgagaagcgcattaccgtccacgatttggcgcttaaatcattggggttgtcgtacaccccaatgttattgccgacggtatcgcgaatgtcgttccactctgaacacgccacctgacaggctttacagccgatacaggtggtaacgtcgatgagtttcgccacttcttcctggaagtcccgcgcctgaggcgcgggggtcagaccgttagtcgcggaacgacgaatgatatcttgagattgataagccatatgtcgtctccgttacaccttttccacattcacaaggaaggacttaaactccggcgtctgcgtgttcgcatcaccaacgaatggcgttaaagtattggcaataaagccttttttagctacgccttcatagccccagtgaatcggaataccgatggtatcgatatctttgccgttcgctttcagcgtgcgaatacgtttggtcaccaccgctttggctttgatatagccacggttggaggagactttcacggtatcgccctgggcaatgccaagtttattcgccagcgactccccgatttccacaaactgctctggctgcaaaatcgcgttcaacagcgcgtgtttggtccagtagtggaagtgctcggtcagacgataggtggttccgacatacgggaacttatcggctttacccaatgcttcggcgtcgtctttaaagatacgtgcagccgggttcgagataacgtttggatgcagcgggttagttcccagcggcgtttcaaacggctcgtagtgttccgggaacggaccttccgccatcttatcgagggcaaacagacgccccatgccttcctgctgcatgataaacggcccgacgccgctacccggaggcgctgcgctgtagtccggaatatcccagccggtccacttagtgccgtcccatttcagcaactgacgcttcggatcccacgggttaccctgcggatctgcggaggcgcggttatacagaatgcggcggttaagcggccatgcccatgcccagcccagcgtgttaccgaggccagacggatcggcgttatcacggcgtgccatctggttgccttccggcgtccagctaccggcgaaaatccagcagccacaggaggttgtaccgtcatcgcgcaattgggcgaacgaactaagttgttggcctttcttgacgataaccgcaccggttgccggatcggtaatatcggccagcgccttaccgttgctctccatcgccacttcttctgaagatggctcatgcggaatggcgtagttccatgtcatgttcagcacctggtccgggttcgcgccaccctgttcggcatacatcttgcgcaagcgcaggaagataccggagaggatctcgccgtcagtcagcgcaatccccggggcgtccgcacctttccagtgccactgtaaccagcgacctgagttaacgatagaaccgttctcttccgcgaagcaggtcgatggcagacggaacacttcggtctggatcttcgacgagtcaacttcgttcagctcaccgtggttctgccagaagttagaggtttcagtgttcagtgggtcgatggtgacgaggaacttcagtttcgacagacaaccgatcactttgtttttgttcgggaatgaggcaacagggttaaagccctggcagatatagccattgaccttgccctctttcatcatctcgaagtattgcaggacgtcgtagcctttatcccacttcggcaaccagtcaaagccccagctattttccgccgtcgctttatcaccaaagaaggccttcatcatagagacgaagaatttcgggtagttgccccagtagtttacctggccttccagcagcggttttggcgtgttggcggtaaggtaggtttgcagatcggtctgcttctcgcttggcagcgtcatgtaacctggcaggctctgcgacagcagccccaggtccgtcagcccctgaatattggagtgaccgcgcagggcgttaacgccgccgcctgccatccccatattgccgagcagcagctggatcatcgccatcgtacgaatgttttgcgcaccaacggagtgttgcgtccagccgagggcatacaggaacgaggcagttttatcgtgagcactggtttctgcgatgtattcgcagactttcaggaacgcgtcttttggcgtaccacagatgttttcaaccacatctggcgtgtagcgggaaacgtgctgtttcagcaagttccacacgcagcgcggatgttgcagcgtggtatcgcgtttggcgaagccgttttcgtccagttcataagtccaggaggatttatcgtacttgcgtttttccgcgtcgtagccggtgaacaggccatcttcaaagccgtaatcctcacgcacgatcaggctggcggtggtataggcttcggtgtattcgcggttgaatttttcattgttcagcaggtacagcaatacgcctgacaggaaagcaatgtcagtaccggaacgaataggggcatagtagtcagctaccgccgccgtacgcgtaaagcgaggatcgatcacaatcagcttcgcgccgttgtgaattttggcttccatcgcccagcggaacccgaccgggtgagcttcagcggcgttaccgcccatcaccacgacgaggttggcgttcttgatgtcgacccagtggttggtcatcgcaccgcgaccaaatgttggagcaagacttgctaccgttggtccgtgtcagacacgcgcctggttgtcgaccgcgagcatacccagcgcgcgggagaatttttgcgttaaatagccggtttcgttactcgacgcggaagcacacagcatcccggtggagagccagcggttaacagtcacgccttcggcgttttgcgcaatgtagttagcatcgcggtcttctttcatcagtttggcgatgcgatcaaacgcctcttcccaactgatttgctgccatttatcagaacctggcgcacggtattccggaaacttcagacggctttcggagtggatgaaatccaccaggccagcgcctttcggacaaagtgcaccgcggttgaccgggtgatccggatcgccttcgatatggaagatagatgctttggcgttttttgctccgtcaccgaggctgtacatcaacagcccacagcctacggaacaataggtgcaggtattacgggtttcgcgggtgcgcagcagtttatactgccgggtttccgcgagtgctacgctgggtgcaaaacccagtgccgctgccgtggtgcctgccataccgccagcgcagatcttaaagaactgccttctgctgacctgcatggattgctccttgtttcgacattgtcacgtcccatttacattcgcttgctgcgtgtgcagggagtgggagttatttttctttgcggaaggggccgcaaaggtccagaattggctcaatttccctccatccaggaagggtttgtaacagaataccataatgttggtgtgtgtgttcttatctggttaagagaaagtgaaaaaaacacagcgaaaagaaatcgaaaatgtgacaaatatcacaggtgttcgtcaaattgagttatggcggcgtgatgatttacaacacccacggttagatgaggtcgcggaagaagttcccgttgcgctggtctacaacggcatttcgcatgtggtgatgatggcgtcgcccaaagaccttgagtactttgcgctcggtttttcgctttccgaggggattatcgaaagtccgcgcgatatcttcggcatggatgtcgttccttcctgtaatggtcttgaagtacaaattgagctttccagccgccgctttatggggttgaaggagcgccgccgggcgctggcgggacgtacgggctgtggcgtatgcggcgtggagcaacttaatgacatcggaaaaccggtgcagccgctaccgttcacccagacgtttgatctcaacaaactggatgatgcattacgtcatctcaacgattttcagccagtggggcaactgactggttgtactcacgccgctgcctggatgttgccatctggcgaactggtcggcgggcatgaagacgtgggtcgccatgtggcgctggacaaactgttaggccgccggtcacaagaaggggaaagctggcagcaaggtgcggtactggtttccagtcgtgccagttatgaaatggtgcaaaagtcggcgatgtgcggcgtagagattttgtttgcggtgtctgccgcgaccacgcttgctgtagaagtggctgagcgctgtaatctgacactggtaggtttttgtaaaccgggtcgggcaacggtttatacccatccgcagcgtttgagcaattaattaaaataagtcctgcgaaatatattaaattgcaggacttattcatttcgtgaattttattattttatttataaacaaaatgcgtgtagtggcgttttcttttttcatttattatgttcactctcttatctatatatttataaggcaattaaatgaaaaggaatttattatcttccgctattatagtcgccatcatgtccctcggtctgacgggttgtgatgataaaaaagccgaaacagaaacgctcccgcctgccaatagtcaacctgccgcaccagctcctgaagcgaaacctactgaagctcccgttgcaaaagcagaagctaaacctgaaacacctgcgcaaccggtggtcgatgaacaagcggttttcgacgaaaaaatggatgtctatatcaagtgctacaacaagttacagatcccggtacagcgcagtctggcgcgttatgctgactggctgaaagattttaaacaggggcctaccggtgaagagcgtactgtttatggcatctacggcattagtgaatccaacctcgctgagtgtgaaaaaggcgtaaaaagtgctgtggcgttaacgcctgcgctgcaaccaattgatggcgtggcggtgagttatatcgatgctgccgtggcgttgggtaataccattaacgaaatggataaatattacacccaggaaaattataaagacgatgcgtttgcgaaagggaaaacgctgcaccagacattcttaaaaaatctggaagcctttgaacctgtagccgaatcttatcatgcggcgattcaggaaattaatgataagcgtcagcttgcggaactgaaaaatattgaagaaagagaagggaaaacattccactactactctctggcagtcatgatttcagcgaaacaaattaataacctgatatcgcaagataagtttgatgcagaagcggcaatgaagaaagtgtctgaactggaaacgctagtggcgcaggccaaagaagcggataaaggcggcatgaatttctcgtttattaattcggcaggccagtatcaactcgaggctaaaaaatacgttcgccgcatcagagataaagtcccgtactctgactgggataaagagcaacttcaggacgcaaactcaagctggatggtcgaagactctttcccgagagcattacgcgagtacaacgaaatggttgatgactataatagcctgcgttaaacgtttttgatgataaatgcagtgtcggatgcggcgcatccgacacagttcaccccttgtgaagtaactccataaatgcctcatatcctgttaacccggcaataatctccgccggatgctgacacaatatgcttgccagatagctaaatatttttagctcatgacgcgcatcggcggcggcgcaggcgatcaagacatggttaatgacttcgttattcacctcaactggttgggcgagggtaataaaaaatccacgaaaacgtcgctcctgttcgctccagcaatgtgggatggcgaggcgattaacaatcaggttttcaccttcgccttcgcgggcgatgatgcgttgtgcttcatcggcggtaatatggtgttgtgcgactaattgcgcacaaatttgccgggtaatatgttgccagctttcaccgcgtacattcgaataatgaaaacttccgggggcagagaaaaaacgctccggctgttggcgaataaatgccgtcgccagaaaatgttttatttgttcgataccggcagccgtaatgatattttttacggtgatgtaattatttaccgcgtcatccagtaaataatggctgttgttaatgatcaataacggctcaatctcttcgcgaatggcaacaagttcgcttaagctacgggcaataattacccgacaatttaaaacatcgcgctcaatggcgagctgattaatagtggcaatcgcgttctggtccgagagcaaaatgatcggctggcgttcgttttgatgccgctccagcgcacaggcaaaatacaaaccgatcagatcgctgtcgaaaaggggaatatcgagctgttcacgcagtagcgtaataaagtgcagactcatatcaaaggccgcaggccaggcggctttcaggttattcatgctgctctggcggtgctcagcaatccacactggtgcggcaaggcaacgtaataaatgcccggtaatattctcaaccagctgcgcatcaataatattcaatgacgcgatgcccggcaccctttgcagcaacccctgcacattatcggctgaaattacctgcgcttgctgatgctgtttctctatcaaacccgtcagggttcttacagcgttatcaccaagaaacagaccgctatgttcaacgatttgttttatctcgtcaccgggatattgcggccactcatcggtcagttgattacgcagggcgtaaatcgccagaatcaggctggagagataatcaccctgcatgagcggccagcggtgttggttgtcgcaggccgtggataaatgctgaaggttgtctcgtgttatgcccgccagcggaattaaaaacggatctttgcgcagcaagttcgccagcaagataacgcgtttctcttctgtctcatcaatgaaatggcccaaaccagggcggctggccaggcaacaagtgcgttcataacgctgttttaaccggggcagacgctctgctacccacgtttctggcaaattaagcgccgaggcgagttgcgcacggggagtgaaagtattcagtaataacagcgccagcagccgatcgtcgttatcgtgcttttgcagcaactgaaaaaagctgcggcgctcgaagatttccagctgatagcccgcactgccactggcgaaaatgcgggctttgccgttaagggtgaagttgagatagtcaatatcacgcaggatggtcctgcctgaaacgccagtctgttgcgccagctcgccaggcgtgcgcggctgttgctccagcagatcgacaatctttaactggcgttcgtttagcattaatccacctgacggaactggctaaacgcgttgactttctccgcagttaaggtcgtcagaaaaccccgtatcagcgtgagcagagcttcgtaatcggcttttgaaatcataccgctgttggcgtgcagataacgagttggcagacacagcgcgacaaccggacgcccgccgcccatcacgttgtagcgcccgccatccgtcgcaccggttttcatggtggaaaattgcagcggtaaatcgttatgtgcggcacagctttttaacgctgctaccagtttctggttggggaagtagcgcttgtcaaacagcatcagccccggcccctggcccagtttcagcgggtatttaatgttatcaatgcccggaacatcgcccgctacggcggtatccaacacgatcacgacgtccggtttaatgtgttccgccgaggtttgcgccccgcgtagcccaacttcttcttccacactgccaacgccatacagcgtaatttcgggattattcaccgtctgcaatagttcagccatcattgcgcagccgatgcggttatccaacgccttgccgaccactttatcttcgccccagcaggcaaaattggcttccgggctaataaaattaccaatttccacgccgcgcttttccacctcttcgcgactgttcgcgccaatatcaatgaacatctcatcaaatgacagcggttgttgcttttgcttttccgttaacgcatgaggcgcgacggaaccaatcacaccagggattttcactcccttgtgtgtgcgtatggttacccggtggttgagcatcgactgattccaccagccgccaatggtggtaaaacgcagaaaaccgctctcgtcgatgtgggtgaccataaagccgacttcatccatatgtccgacaacggcaacttttggacctttattccccttacgggcaacaaagctgcccagaccatcgaaggtgatttcattcacgcaaggttccagcgtgtttatcagaatgtcgcgaacttcctgttcatcgccgctgacggcgctggcttcgcacaactgttgcagtaactcaatgttcatggacaagctcctgttgcgcggctttcgctttgcggcgtaaccacaatcctttcaggacgataatgaatgaaatgttcagcgcgaggccaatcgccagcaccagataaaacgaacccaccggcgacatcaggccgatcagcgggtcaaagatacccaaaccaggtgccagacgtttgattccgaaagcgatcaccagcacgccggtaatgccgcccgccagcgtattggcggtaatcatcggcaacggagctgccagagcgtaaggaatagccggttcggttgcgactgtggcaccgaccacaatggcactactggcagcctctttttcctgtcgggtaaacagtttgggcgcaatgaacgtcgcaagacccgccgcgacgggcggcatcagcgcgacaacgccgacgatggcgtaccagtcataaatgtgtttttccagcagtgagaagcagaagaaccaggcggttttattgatggggccgcccatatcgaacgccagcatcgcaccgaccagaaacgctgccgcaaacttcattgatggaggaatggtattcaggaagtggagcagcccgcccatgaggtcggacatcaccggcccgataacgtagtaagtgagcacgccgaaaaccagcagagtaacgaacgggatcagcattgaaccgagcagcggttgtaatgctttgccaaggcgcactttgcggaaccagaagacgaaatagccaatcgccagccccagcaccaccgcgccgaggaatcccgcacccgactgggtgccgagcagcgctttgtcgttcgccagatagcaaaccagaaacgccggagcgaaagccggtttatcggcaatcgacgaggcaatataagcgcccatgatggggatcataaaggtgaagccaaggtaaccgatggattcaactacccaggtaaacgacggcgcgcctttcgacatatcggtatacggcaaaccgaactgcaccagcatgttggcaagcgccaccaggataccaccgccgatgacaaacggcagcgccgcagagacgcccgccatcaggtggctcatcacgctaccgctttgcacttcctgtttgccaagcttcacgccgctatctgcggcaaaaagctgcgagtttgtcggtaattcgctgaaaatctggtcgatatttttcaacgcctgggagatggcaatctcataaactttcttcccggcaaaccgcgcgcgatcatcaccgctcaggccacgcccggtagcgagaatgacgtaatcggcagcggcaatctcttcgctggataagcggttttcaacgccactggacccttgagtttccacttttatggtatgaccgagagaacgggctttctgttccagggcttccgccaccatgtaggtgtgagcgatcccggcggggcagttggtgatcgcgacaatacgtaaggatgactccatcgccacttccttatgagctgagggtttgatttaacaaggcaagcacctggtcggtatcgccctgttgcagttgatgaataaattccttgtgaataattttgcgacacagtgtgccgatgattttgacctgatcctcttcgccgctttgcggcacgccgaggcagatccagcaattgacgtcttcgccatcgctggctttccagtcaatagcctgcgctttgcgggcgaataatacgaacggttgtttaacgcaggcgcttttaccgtgcggcacggcgacaccggaaccaaatccagtagagtgcattttttcgcgcagcagcagggtttgcaggagctggtgtgagtcggtgataaaaccgttttgtaacgctattgtcgccaactgcttcagaacggaataagcgccattgccctgaatattcaggtcaatacagcttgcagtaagagctgccattaatcggactccataaaatatattttaatcaattgtaatggtggagcgattaagtgatgagaggcgatatgtcggtaaacaatgacaatttgagacagagtgaaaggtcagatttgcggagtaatgcacataatggttatttaaataaaccacatgaatcattaatgggttattcattatttttgtgatttactcacaatgtatcagggaaatataacttaccgggagatgtaatatgtttaatttttcaaatcgaaatttaaaatattgtgccggaggcatctctggcacattgggcaattacggcaggtaaaacacttcttgcagctcgctactcaccgggctgttatccgggttagcgggcataacatcggtcatatatttccaccaacgttggcaaacatcagtgctggcaaccgcattccagcgttcttcagattcaatctctaccatggcaaacagcagattacgcgctttgtcgagatagatggcgtagttatgcgcaccgtgagatttcagcactgcttccagttctggccagatgggattatgccgacgctgatactcttcgtgggcgtcggggtttacctgcatgacaaaggctttgcggatcatgtttgctccttacagcgccagcgcactggcgagtggcgtaacgccgaaacgcttgccgagcgctatcaactcttcacggctgatggtctgtttcatgccgcccatcgaataaaccttcactaatacttgtgctgatttttctgcggtgtcgattaaaccgaaggtttcatccagcgtcggtccgctgccgaagacgccgtggaagggccacaacaccagcgaatgtttttgcatctcttgtgcggtcgcctggccgatttcgtccgtgccgggcaccatccacggcaaaatgccaacgccatccgggaataccaccagacactcggtgctgccttcccacagttggcgagtgaagaccgcggtgtcgttttcaagtacataggtgagggcgatcaggttggtggcgtggcagtgcatgatcacccgatctttgccgttggtggctttaatgcgctcgcagtgggaaaggaagtgagccggaagttcggaagtggggacggcttcgttggttaacccccaaagaatgtggtagcccgcgccgtcgctgtcgacttttacgatgcctaagttagccgcaggatcaagctggacgttacggaagaatttgcccgagccggtgacaataaacggtgtatttgccagtaaaggcatgggctggctgagcgggatatagcgcggttgttggtggaaattgtcgtgatatggtgcgatatcggcgtcatccaggcgtagcgtcaggttgccgccgttgcgctcatcccagcctttcagccaggcgtcggtggtggctttgatcattccctggacaaaccaggactgagtaatgttttgcatgttctgtgttcctgtaaattcggtgttgtcggatgcacgacccgtaggccggataaggcgctcgcgccgcatccggcaatcaatgcctgatgcgacgctgtcgcgtcttatcaggcctacaactattgccgacctgtaggcctgataaggcacttgtgccgcatccggcaatcaatgcctgatgcgacgctgtcgcgtcttatcaggcctacaactgttgccgacctgtaggccggataaggcacttgtgccgcatccggcaatcaatgcctgatgcgacgctgtcgcgtcttatcaggcctacaactattgccgacctgtaggccggataaggcacttgtgccgcatccggcaatcaatgcctgatgcgacgctgtcgcgtcttatcaggcctacaactgttgccgacccgtaggccggataaggcgctcgcgccgcatccggcagtgtttacccgcggcgactcaaaatttctttctcataagcccgcacgctctccagccattcgctacctgctggcgtatcgtgacgttggcaatacatttcccagaccgcctgccacggcaacgatttctgctcttccagcagtgccagacgcgcagtgtaatcgcccgccgcttccagcttgcgcagctcagcggtaggttccagcaacgcacgcagcagggcttttttcatattgcgtgtaccaatgacccacgcggcaatgcggttgatagaggcatcgaagaagtcaaggccgatatgcacccggtcaaacagatcgtgacgcacaatctcactggcaattgcctgggtttcatcatccagcagcactacgtgatcgctgtcccagcgaaccggacggctgacgtgcagcagcaactgcggcacatacagcatggcggcggaaatcttgtcggaaatcacttcagtcgggtggaagtgcccggcgtccaggcacagcgcagtctggcggctggtggcataccccatgtaaaactcattggagccaaccgtgtagctctctgcgccaatgccaaacaatttgctctcaacggcgtcgatatggtgcgcagggtttagcttctcgctgatcacctcatccagtgctgccagcagacgctgacgcggggcgagacggtcaacggtgatatctttcataccatccgggatccagatgttcatcaccgatggtgtgccgagttgctcgccaaaataggccgaaacgcgacggctggctttgcagtgatcaatccagaactggcgaatgctgtcgtcggcatgggaaagcgtaaagccatcggcgcttagcggatgcgaaaagcaggaggggttaaaatccagaccgagctgattggctttcgcccattcaacccagtttttgaagtgctctggtttgatctggtcgcgcgagactggcgtatctgattccagatagatggcatgtaaattaagccgtttcggccccggaatcagccgcatagcctgttccagatcggcacgtagctcactggcattacgcgctttgcccggataattgcctgtggcctgaatccccccggtcagcgaaccttccgggttttcaaaaccggaaacatcatcgccctgccagcagtgcattgaaacgggtaaacgatcaagttggcgcagcgcctcctcgacatcaatccccaccgccgcgaaacgctgtttcgctagctcccaggcctgttccagttgagtggtcatgcgcaaagctcctttgtctgtcgtgtagagtgaatctgcgccacatagtgggcaatttcactgtcaggattaggggtaaaggtggtcagattcgcggtggtgctgacgacctgacggaaatcatccacattgttgagttcatccagcgtcattaactggatgccgatattgccgagcgtcgaggcttcaacaggcccggcgatcacccgaataccgcaggcatcggcgcatagctggttgagcagcgtgttctggcagcctccgccgacaatatgcagttgcgagaaatcttcaccgcgcagctgcgccagctcatgcaacacatcggcatacagcagcgccagactgtcgaaaatgcagcgcgccagttcagcatcactttccgggatcggttgcgccgtttcccgacacgcagcctgaatttcgctgcacatcgtctcaggattaataaagcgatcgtcattgggattgataatgaagcggcaagccggaagtgcctgtgtcgcggagataagcgccggaagatcgttgatttgctgctcctgaagcactcgctgaagcagccataagcccataatatttttcagcacccgatagcgaccttccgccccgccttcattggtgatgttggctgccagtgccgtgtcattggtaaatggcgtctggctttcgaagcccatcaatgaccaggtgccagaagagagataagcagcacgtgagccgtttaacggcgaggcgataaccgcgctggcggtatcatggctggcaacggcgaccactggaatctcattaccctgcgggcaaatccagtgacctatgacattacccggatgcgtcgggcgaccaaaccaggctttgttggccccgctccacgccagtagcgactcgtcccagtcgtcgctattgatattgaccagttgcgtggtcgtggcgttggtatattcccagttcatcttgccggtcaggcgataactgaagtaatccggcatcagcagagcgtgagcaatgtgtggaataagttcaggttgttgctccgtcagcgcacgcaactgataaagcgtattgaagggcagaaactggatgccgctacgttgataaatatcgcgtttgccgagttgttgttgtgcctgcgccattaggccattggtgcggctatcgcgataagcaacgggcaggcccacacgctgaccctgttggtcgagcagcacaaagtccacgccccaggtatcaatcccaatgctatcgatacgaatcccttcctcgcacaccttgtttaatccaaggcgaatggcactttcaaggctatccacatcccaggtgacatagccgttctgactatgcagcccattgttaaaacgatggatttcgcgcagcgtcaggctgcggcattcacgctcgtaacgcgccagcatcacgcgcccactggatgcgccgagatcgacggcgacacaattgcgaaaggtcataatgtgatcctgctgaatttcattacgaccagtctaaaaagcgcctgaattcgcgaccttctcgttactgacaggaaaatgggccattggcaaccagggaaagatgaacgtgatgatgttcacaatttgctgaattgtggtgatgtgatgctcaccgcatttcctgaaaattcacgctgtatcttgaaaaatcgacgttttttacgtggttttccgtcgaaaatttaaggtaagaacctgacctcgtgattactatttcgccgtgttgacgacatcaggaggccagtatgaccgtattacatagtgtggatttttttccgtctggtaacgcgtccgtggcgatagaaccccggctcccgcaggcggattttcctgaacatcatcatgattttcatgaaattgtgattgtcgaacatggcacgggtattcatgtgtttaatgggcagccctataccatcaccggtggcacggtctgtttcgtacgcgatcatgatcggcatctgtatgaacataccgataatctgtgtctgaccaatgtgctgtatcgctcgccggatcgatttcagtttctcgccgggctgaatcagttgctgccacaagagctggatgggcagtatccgtctcactggcgcgttaaccacagcgtattgcagcaggtgcgacagctggttgcacagatggaacagcaggaaggggaaaatgatttaccctcgaccgccagtcgcgagatcttgtttatgcaattactgctcttgctgcgtaaaagcagtttgcaggagaacctggaaaacagcgcatcacgtctcaacttgcttctggcctggctggaggaccattttgccgatgaggtgaattgggatgccgtggcggatcaattttctctttcactgcgtacgctacatcggcagcttaagcagcaaacgggactgacgcctcagcgatacctgaaccgcctgcgactgatgaaagcccgacatctgctacgccacagcgaggccagcgttactgacatcgcctatcgctgtggattcagcgacagtaaccacttttcgacgctttttcgccgagagtttaactggtcaccgcgtgatattcgccagggacgggatggctttctgcaataacgcgaatcttctcaacgtatttgtacgccatattgcgaataatcaacttcgttctctggccgaggtagccacggtggcgcatcagttaaaacttctcaaagatgatttttttgccagcgaccagcaggcagtcgctgtggctgaccgttatccgcaagatgtctttgctgaacatacacatgatttttgtgagctggtgattgtctggcgcggtaatggcctgcatgtactcaacgatcgcccttatcgcattacccgtggcgatctcttttacattcatgctgacgataaacactcctacgcttccgttaacgatctggttttgcagaatattatttattgcccggagcgtctgaagctgaatcttgactggcagggggcgattccgggatttaacgccagcgcagggcaaccacactggcgcttaggtagcatggggatggcgcaggcgcggcaggttatcggtcagcttgagcatgaaagtagtcagcatgtgccgtttgctaacgaaatggctgagttgctgttcgggcagttggtgatgttgctgaatcgccatcgttacaccagtgattcgttgccgccaacatccagcgaaacgttgctggataagctgattacccggctggcggctagcctgaaaagtccctttgcgctggataaattttgtgatgaggcatcgtgcagtgagcgcgttttgcgtcagcaatttcgccagcagactggaatgaccatcaatcaatatctgcgacaggtcagagtgtgtcatgcgcaatatcttctccagcatagccgcctgttaatcagtgatatttcgaccgaatgtggctttgaagatagtaactatttttcggtggtgtttacccgggaaaccgggatgacgcccagccagtggcgtcatctcaattcgcagaaagattaattcgccatgccgatgccgacgatgttagcggcgacaataatcaccacacaaccgaggctcaacaccgttaccggacggcgtcctgcattgttccactctttcagcaccagcccgacgataccgccgcacaatacatagaaactcatatgcagcatccaactgatgtagtcatactgcgccggaatgcgggcgtggccccaggcatagaaaaagaattgcagataccacatcaacccgcccagtgtcgagagtaacacattgtgaatgatcagcgattttgccagcgagaagtcggcttttagcgacaaatccttcacttttgccagacgaataaaacagaaaccgaggttaatgatcgcgccgccgcccatgatgacaacatagcttggcagagcgacatacagtggatcgacgccaagtgcggcagcggcttcatgcatcggttttgcggcgttcatcgcaaaggacatcccggcagagaaaatgccgcacatcaccgccagcaccagcccttttttcagattgaactcttcggctttaatgcccatcttgcgctctttcaactgcccggcgcgagttacaatccctacgccaatcagcgccaccagaacgccgagcaacgtcatgcgtccgccttcggtgctaatcaacacatcgaaattgccgttgataattggcgtcatcagcgtaccgacaatcaacgtaatgccaatggcgatgccaattcccatcgacatgccgagataacgcatggtcaggccgtagttgatattaccgatcccccacatagcgccgaacagaaaaacaggcagtcgcgtagagagactaaacgagctgtaatacgcccagaaattcggtagtaacagggcgctgatggcccacggcagaataatccacgaaacaatcccaccgactgaccacatggtttcccatgaccatttttttacttttttgaacggagcgtaaaaacaggctgcactggccgcgccgatcaaatgccaaaatatccccatcgtaatcgcgttactcatcttcttatcctcatcatttttcgtcgcgtcacatctccgacgagatgagtgtaaaaatcgtgctgtcgattaacctttcgcctgttgccgccgttgtcgatttactggcaatcacggcattaagtgggtgatttgcttcacatctcgggcattttcctgcaaaaccatacccttacgaaaagtacggcattgataatcattttcaatatcatttaattaactataatgaaccaactgcttacgcggcattaacaatcggccgcccgacaatactggagatgaatatgagctataccctgccatccctgccgtatgcttacgatgccctggaaccgcacttcgataagcagaccatggaaatccaccacaccaaacaccatcagacctacgtaaacaacgccaacgcggcgctggaaagcctgccagaatttgccaacctgccggttgaagagctgatcaccaaactggaccagctgccagcagacaagaaaaccgtactgcgcaacaacgctggcggtcacgctaaccacagcctgttctggaaaggtctgaaaaaaggcaccaccctgcagggtgacctgaaagcggctatcgaacgtgacttcggctccgttgataacttcaaagcagaatttgaaaaagcggcagcttcccgctttggttccggctgggcatggctggtgctgaaaggcgataaactggcggtggtttctactgctaaccaggattctccgctgatgggtgaagctatttctggcgcttccggcttcccgattatgggcctggatgtgtgggaacatgcttactacctgaaattccagaaccgccgtccggactacattaaagagttctggaacgtggtgaactgggacgaagcagcggcacgttttgcggcgaaaaaataatcatttgccgcctgctgcaatgaggcgtataggccgcatatcagcttaaaaaatgaaccatcgccaacggcggtggtttttttgtgatcaatttcaaaataaaaacaatgatccgataaaaataaaacagcgtttcaattgatgtggttttgatcacttttattgattaaatgaatgtctatcttcgtttccatcaacactgatgctccattgaggaattacgcatcagcccttaaaaatatgccgacaggtgatggaaatgcagataaaacgctcgattgagaaaatcccgggggggatgatgctcgtcccgctattccttggcgcactgtgccacaccttctcgccgggggcggggaaatattttggatcattcaccaacgggatgattaccggtacggtgcccattctggcggtgtggtttttttgcatgggggcgtcaataaaattaagcgcgacgggaacggtactgcgtaaatccggtacgctggtggtaactaaaattgccgtcgcgtgggtggttgcggcaattgcctcgcgtattattccggaacatggtgttgaagttggattctttgccggactttcaacgctggcgctggtggcggcgatggatatgaccaatggcggactttacgcttccatcatgcagcagtacggcacaaaagaagaagctggggcatttgtgttgatgtcgttggagtccgggccgctcatgacgatgattattctgggcactgccgggattgcctcgtttgaaccgcatgttttcgtcggcgcagtattaccgttcctggtgggctttgccctggggaaccttgaccctgaattgcgagaatttttcagcaaagcggtgcaaacgctgattccattctttgccttcgcgctgggcaataccattgatttgactgtgattgcccagactggtttgctggggatcctgttgggtgtggcagtaattatcgtgaccggtattccgttgattatcgccgataaattgattggcggtggcgatggcactgccggaattgccgcttccagttccgcaggggccgcggtagcgacacctgtgctgattgcagaaatggtgcctgcgtttaaaccgatggctccggcagcaacttcgctggtagcgacggcggtcattgtgacttcgattctggtgccaattcttacctctatctggtcacgtaaagtcaaagccagagcagcgaaaatcgaaattttaggtacggtgaaataaacctgcttccttaatccccacagccggatgaactaacgttcgtccggtttgctattgagttcctgcctggatacttaccgcgaaaacagcacgcctgacataaaataaatatggtctaatggggaaatttctcgtggagagggaacagatgcgatatccggttgatgtatacacaggcaagattcaggcttatcccgaaggcaaacccagcgcaattgctaaaatccaggttgatggtgagttgatgctgacggagctggggctggaaggtgacgagcaggcggagaaaaaggttcacggcgggccagacagagcgctgtgtcattatcctcgtgagcattatctctactgggcgcgggaatttccggaacaggcggagttgtttgttgcgcctgcgtttggtgaaaacctctcaaccgacggcctgacggaaagtaatgtttatatgggcgatattttccgctggggagaggcattaattcaggtcagccagccgcgctcgccttgctataaactcaattaccattttgatatcagcgatatagcgcagttgatgcaaaacacaggtaaggtggggtggttgtatagcgtgatagcgccagggaaagtgtctgcggacgcgccgctggagttggtttcccgtgtcagcgatgtgaccgtgcaggaggctgccgccatcgcatggcatatgccgtttgatgacgatcaatatcaccgtttactctccgctgccgggttatcgaaaagctggacgcggacgatgcaaaagcgccgactgagcggcaagatcgaagatttttcccgccggttgtggggaaaataacccccggagtgtaggcctgataagacgctatcagcgtcgcatcaggcatcctgctcaaatgccggatgcggcgtaaacgccttatcctgcctgcaaatgcgaagtttaactccgcttatacagcggcaaccaaatcaccagccgtaaaccgcccagcgggctgtcttctgccttcacccagccacgatgctgctgaatggcggtttcaacaatcgccagccccaaacctgtaccgccagattcacgatcgcgtgcttcatcggtacgatagaacggacggaaaatctgttcgcgatcttccgggctaacgccaggaccatcgtcgtccaccgtaatggtgataccgtctttatctaccgcaaagcccacttcaatcttcgtatgggaataacgcagagcattacgaacaatgttttccagcgcactttccagggcgttcggattgccgtacagcggccacggcccaggcgggaagttaactgtcaacgacttgcccatttgctcggcttcgaacgccgcgttatccagcacttcactccacaactggttggctttgatggtttcgctaaccagcgcgtttttttgctgattacgtgacatcaccaacagatcgttgatcatgctgtccagacgttgcgcttcggtttcaatacgctccagttccttgctttcaccgctacgacggcgcagtaacgccgtacccagttgcagacgcgtcagcggggtgcgcagctcgtgagagatatcagaaagcagacgctgctgagaggtcatcatgcgctccagcgcggtgaccatctggttaaaactggcacctgcggcaaggaattcctgtggccccgcttccagttccgggtgctggcgtaagtttccctgggcaacttcatcggcagcgtttttcagcttacgcgccggttttgccagactccaggccaaccacaacagcagcggcgtactgaccaacatggtgacaatcagcagtaatagcgggcggtcaaacagtaagttaatgaaatcggattgagaactgctggccggacgaatcagataaagttggtaattatcttcgccatcacgcacggagaacggaccgaccagttccacgcggccatactttttcttctgcggatgatcggcgttatcggcctgaccaataaagttacgaatgatctgcatttcgctgcgttcagcgccgatcacgcggccttcggtggtcaccaataacaaacgctgtcctggcggtgcccacttatcaatcgcccggaacagacgccgccaccacattaaatcgttgggcggatcgttcgccagctccgcttcgacatgctgctcaatcatcagcccctgacgctgttcgctatccagaagctcggtcatctggcgtgaatcgagcttgggtaacatcaaaaccaacatcaacaccagcgccagcgtcagccagaagatggcgaagatgcgcgcggttaagctgcctatcatgaagcagaaaccatcagatagccgcgaccacgcaaggttttaaaccacgggtgaccatctttacgatccggcagtttacgacgcaggttggaaatgtgcatatcaatagcgcggtcgaaaggcgtcaggcgtttgcccaacacttcctggcttaaatgttcacgggaaaccacctgacccagatgctgtgccagcaaatagagcagggtaaactcagtaccggttaactccagcgtttgcccgtcgaagctggcttcctgacggcctggattcagcactaaggcatcaacttccagtgtcggtgaaccgttgtcgttgttttgctgttgctcgctccagtgcgaacggcgcaggatcgcgcgaatacgtgccaccagctcacgatcattaaacggtttcgggagatagtcatctgcgcccagctcaaggccgagaacgcgatcaagttcactgccgcgcgccgtcaacataatgacaggcgtctggtgtgtctggcgaagtgcttttaatgtgtcgataccatttttcttcggcatcattacgtcaagcaaaagtaaatcaatgctgtcgtccagaagatcaagcgcctgttccccatcgtgggcaacaatcacgttgaagccttccatctcgagcagctcctttaatagggaagtcagctctcggtcatcatcaactaacaggattttattcattgtttaaatacctccgaggcagaaattacgtcatcagacgtcgctaatccatgactttacgttgttttacaccccctgacgcatgtttgcagcctgaatcgtaaactctctatcgttgaatcgcgacagaaagattttgggagcaaatgatgcgcatagttaccgctgccgtcatggcctcaacgctggcagtcagttcattaagccacgctgctgaagtcggttcaggcgataactggcatccgggtgaagaacttacgcagcgcagtacgcagagccatatgttcgacggcataagtttaaccgaacatcagcgtcagcagatgcgagatcttatgcaacaggcccggcacgaacagcctcctgttaatgttagcgaactggagacaatgcatcgccttgtcaccgcagaaaattttgatgaaaacgctgtgcgcgcacaggcagaaaaaatggcgaatgagcaaattgctcgtcaggttgagatggcaaaagtccgcaaccaaatgtatcgcctgttaacgccggagcagcaagcggttttaaacgagaaacatcaacaacgaatggagcagttgcgtgacgtgacgcaatggcaaaaaagttcatcgttgaagctattgagtagtagcaactcacgttcccagtagtaaaccctgttttccttgccatagacaccatccctgtcttcccccacatgctgtgggggttttttttatcctcaatttgcctgctgcttaatgcattgcagatgatttgcttccgttatactagcgtcagttgatagcgggagtatttatgaatcaatcttatggacggctggtcagtcgggcggcgattgctgcgacggcgatggcttcgctgctattgctgattaaaatttttgcatggtggtataccgggtcggtgagtattctcgccgcgctggtggattcgctggtggatatcggcgcgtcgttgacgaatttattggtggtgcgatattccctgcaacctgccgacgataatcactcgtttggtcacggtaaagctgagtccctcgcggcgctggcgcaaagtatgtttatctccggttcggcactattcctgtttttgacgggtattcaacatctgatatctccaacaccgatgacagatccaggcgtcggggttatcgtgacaattgtggcgctaatttgtacgattatccttgtctcgtttcagcgttgggtggtgcggcggacgcaaagccaggcggtgcgggctgatatgctacattaccagtctgatgttatgatgaacggcgcaattctgctggcgctggggttgtcctggtacggctggcatcgcgccgatgctctgtttgcattgggaatcggcatctatattttatatagcgcgttacgcatgggatatgaggcggtacagtcattactggatcgcgcattgcctgatgaggaacggcaagaaattattgatatcgtgacttcctggccgggtgttagcggcgctcacgatcttcgcacgcggcagtcagggccgacccgctttattcagattcatttggaaatggaagactctctgcctttggttcaggcacatatggtggcggatcaggtagagcaggctattttacggcgttttccgggatcggatgtaattatccatcaggacccctgttccgtcgtacccagggagggtaaacggtctatgctttcataatcagtataaaagagagccagacccgcattttgtgtataaaataccgccatttggcctgacctgaatcaattcagcaggaagtgattgttatactatttgcacattcgttggatcacttcgatgtgcaagaagacttccggcaacagatttcattttgcattccaaagttcagaggtagtcatgattaagaaaatcggtgtgttgacaagcggcggtgatgcgccaggcatgaacgccgcaattcgcggggttgttcgttctgcgctgacagaaggtctggaagtaatgggtatttatgacggctatctgggtctgtatgaagaccgtatggtacagctagaccgttacagcgtgtctgacatgatcaaccgtggcggtacgttcctcggttctgcgcgtttcccggaattccgcgacgagaacatccgcgccgtggctatcgaaaacctgaaaaaacgtggtatcgacgcgctggtggttatcggcggtgacggttcctacatgggtgcaatgcgtctgaccgaaatgggcttcccgtgcatcggtctgccgggcactatcgacaacgacatcaaaggcactgactacactatcggtttcttcactgcgctgagcaccgttgtagaagcgatcgaccgtctgcgtgacacctcttcttctcaccagcgtatttccgtggtggaagtgatgggccgttattgtggagatctgacgttggctgcggccattgccggtggctgtgaattcgttgtggttccggaagttgaattcagccgtgaagacctggtaaacgaaatcaaagcgggtatcgcgaaaggtaaaaaacacgcgatcgtggcgattaccgaacatatgtgtgatgttgacgaactggcgcatttcatcgagaaagaaaccggtcgtgaaacccgcgcaactgtgctgggccacatccagcgcggtggttctccggtgccttacgaccgtattctggcttcccgtatgggcgcttacgctatcgatctgctgctggcaggttacggcggtcgttgtgtaggtatccagaacgaacagctggttcaccacgacatcatcgacgctatcgaaaacatgaagcgtccgttcaaaggtgactggctggactgcgcgaaaaaactgtattaatgatttcggaaaaaggcagattcctttaccctgaaaccgatgacagaagcaaaaatgcctgatgcgcttcgcttatcaggcctacatgaattctgcaatttattgaatttgcaaacttttgtaggccggataaggcgttcgcgccgcatccggcatggacaaagcgcactttgtcagcaatatgaggcggatttcttccgcctttttaatccctcaacatatacccgcaagttatagccaatctttttttattctttaatgtttggttaaccttctggcacgctttgctcatcacaacacaacataagagagtcgggcgatgaacaagtggggcgtagggttaacatttttgctggcggcaaccagcgttatggcaaaggatattcagcttcttaacgtttcatatgatccaacgcgcgaattgtacgaacagtacaacaaggcattcagcgcccactggaaacagcaaactggtgataacgtggtgattcgtcagtcacacggtggctcaggtaaacaagcgacgtcggtaatcaacggtattgaagctgatgttgtcacgctggctctggcctatgacgtggacgcaattgcggaacgcgggcggattgataaagagtggatcaaacgtctgccggataactccgcaccgtacacttccaccattgttttcctggtacgtaagggaaatccgaagcagatccatgactggaacgatctgattaaaccgggtgtttcggtgatcacgcctaatccgaaaagctctggtggcgcgcgctggaactacctggcagcctggggctacgcgctgcatcacaacaacaacgatcaggcaaaagcacaggattttgttcgggcactgtataaaaacgtcgaagttctggattctggcgcgcgtggctccactaacacttttgtcgagcgcggaattggcgatgtactgattgcctgggaaaacgaagctctgctggcagcgaatgaactggggaaagataaattcgaaatcgtcacgccgagtgagtctatcctcgcagagccaaccgtgtcggtggtcgataaagtggtcgagaaaaaaggtactaaagaggtggcggaagcctacctgaaatatctctactcgccagaaggtcaggaaattgccgcgaaaaactactaccgtccgcgcgacgctgaggtggcgaaaaagtacgaaaatgcgtttccaaagctgaagttattcaccattgatgaagagttcggcggctggacgaaagcgcaaaaagagcattttgctaacggcggtacgttcgatcagatcagcaaacgctgatttccccaggataattatcaaacccggtggtttctcgcgaccgggttttttatttgtcacgattttgcgttacccttgcatctctttgaggtacagggaaaaaaagatgaaaaaagcgggtcttctttttttggtgatgatagttatcgccgttgtggctgccggtattggttactggaaattaaccggtgaagagtcggatacattacgtaagattgtccttgaggaatgtttgcccaatcagcagcaaaatcaaaatccttcgccatgtgcggaagtcaaacccaatgccggatacgtggttttaaaagatcttaatggcccactgcaatatctgttgatgccaacgtatcgtattaacggtactgaaagtcctttgttgaccgatccttcaacgccgaacttcttttggttggcttggcaggcgcgtgattttatgagcaaaaaatacggccagccggttcccgatcgcgcggtttctttggcgatcaactcccgcaccgggcgtacgcaaaaccattttcatattcatatctcttgtattcgtcctgatgtgcgcaaacagctggataacaatctggcgaacatcagcagccgctggttgccactgccaggtggtttgcgcgggcatgaatacctggcgcgtcgggtaacggaaagcgaactggtacaacgcagcccatttatgatgctggcagaagaagtacctgaggcgcgggaacatatgggacgctacgggctggcgatggtacggcagagtgataactcatttgtattgctggcgacacaacgaaatctactgacgcttaaccgtgcttcagccgaggaaattcaggatcatcagtgtgagattttgcgttaaggcgaagagttaaggaaagtaagtgccggatatgaaatccggcacctgtcagacttaagcctgtttagccgcttctgcagctttaacgattactgcgaaggcgtcagctttcagagaagcaccaccaaccagcgcgccgtcgatatccggctgagcaaacagttctgcagcgttagacgcgtttacagagccgccgtactgaatgatcacttgttcagcgatgttagcgtcaactttagcgatgtggtcacggatgaatttgtgaacagcctgtgcctgagccggagttgcagatttgccagtaccgattgcccatacaggttcgtaagcgataaccgcaccttcgaatgccgcagcaccctgagttttcagtaccgcgtcgatctgacgtgcgcaaacttcttcagttttgcccgcttcattttcagcttcggtttcaccgatgcacagaaccggagtcaggccctgctctttcagcaccgcgaattttttcgcgatcagttcgtcagattctttgtggtaagtacgacgttcagagtgaccgatgatgatgtactgtgcgccgatgtctttcagcatagcagcagaggtttcaccggtgaatgcgccggacaggttcaggtccacgttttgcgcacccagcatgatgtggctgccttcagcttcgcgcttcgccatatcgatatacatttccggtggtgcgattgcaaccgcacagccagcaacacctgccagctctttacgcaggttagaaaccagctcgtgaaccatgtggcggctgccgttcagtttccagttacccatcactaaaggatgtcgcattttaattctccacgcttataagcgaataaaggaagatggccgccccgcagggcagcaggtctgtgaaacagtatagagattcatcggcacaaaggctttgctttttgtcatttattcaaaccttcaagcgattcagatagcgccagcttaatcggttcaacagcgaaggtcagccccttttcgccgttgtccgcgacaacataacgcagtgcaccttctgtctcggtgtaataacgtttgtttttccccgccgttagtagcgactgcagttttttctggctttgtgttttggtcattaatggggtgagtgtgcggatcaccgctgccatgtattcctgagctttcgctttcgcggctttttgctctggcccctggatgggtagccaggtcatttgaatgcttttgatttttaaggtaccgcgctccagcgctgtagaagcatacaagttctcattaattttacttgcagcacgagtgagattggctttgtcgggactgctgtcgatggcacgaaattcgttcagtggcaggctgggattctggctgttaaagtcttctcgaaactggctgatggagagatcgaaagtaggggctccagccagcagataaggcgcggtcgttgccgtatctggtgtttgtgcatgcgcctctgttgtaacggttaatgcagaacataagagaaaaaacagcgtacaccctggcttcattgacagtaccttttgttatgactggctccgattaaaacgatatctgtcgcccttgtcaaaagggtagaatcctggaaaagacaaccatcaaggaacttacatgaccatacagcaatggttattctcatttaaagggcgtattggacgccgtgatttctggatttggataggcctgtggttcgcaggcatgctggtgcttttctcactggcgggtaagaatctactcgatattcagaccgcggcgttttgccttgtgtgcttgctctggccaacagcggcagtaactgttaagcgcttgcatgatcgcgggcgttccggcgcatgggcatttctgatgattgtggcgtggatgctgctggcgggtaactgggcgattttaccgggtgtctggcaatgggcggtggggcgttttgtcccgacgttgattctggtgatgatgcttatcgatcttggtgcgtttgttggcacacaaggcgaaaataaatatggtaaagatactcaggatgtgaagtataaagccgacaataaatcaagtaattaacctttaatatatctcttactgctatttttttccgggattgttatttccacgatgcaaatgacaatacccggaaaatccttctgaactcttcaccttaagcaatatcaaaaaaaatggtaatccataagatcattacttgtttgttcttcccttaacggcgcattattcttaagtcgtaatcgacagagaggcgaatatacagaggtgccctatgaaagatgtcgtagataaatgcagtactaaaggatgtgcgattgatatcggtacggtgattgataacgacaactgtaccagtaagttttcgcgcttttttgccacccgcgaagaagcagagtcttttatgaccaaactgaaagagcttgccgccgctacatcctctgcagatgaaggggccagcgtggcctataagattaaggatctggaggggcaagttgagcttgatgcggccttcactttctcatgccaggccgagatgattatttttgagttatcactgcgttcgttagcttgatggagttgctttagaaggagttaaacatggcttataaacacattggcgtggcaatttccgggaatgaagaagatgccttactggtgaataaagccctggagctcgccagacataatgacgctcacctgacgttaattcatattgatgatggcttaagcgagttgtatccgggtatctacttccctgcaacagaagatattcttcaattgttgaagaataagtcggataacaagctgtataaactgacgaaaaatattcaatggccgaagacaaaactgcgtattgaacgcggagaaatgccggaaacactgctggaaattatgcaaaaagagcagtgcgacctccttgtctgtggtcatcatcactcatttatcaaccgtttgatgccggcatatcgcgggatgatcaataagatgagtgcggatttgctcatcgtgccgtttatcgataagtaaccgcttaccagtaatgctccgctgtcatatggcccggtcggcgacgtaaatgtttcgtcatctgccgggtctctttcagcaactgttgtgtatcgcgcaccatctgtggattgccgcacagcatcacatggctggtttctttattcatcggcaggccaatcgtgctttccagttccccactttcaattaatgccggtatccgtccggtgagcgaccccgctgccgtttcccgactgaccaccgtctgaatgcgcagttttccttcgtagcgtttttccagttcctgcatcagtggcaaatagcttaagtcggcggcataacgtgcggcgtgcaccaggaccagatttttgaagcgatctaaatctttacctagttgcagaatcgataaataagggccaatcgctgtaccggttgccagcatccatagcgtttcgcagtgcggcacttcatcgagcacaaagaatcctgccgcttcgctaaccacctgcacttcatcgcctggtttcagtgccgccagtcgtgggcttaatttgccatcggggacggtgaccaggtaaaactccagatcgggattatcgggcgagtttacataggagtaggcgcgctggacgcgttcgccgtcgatttcaaggccaagcttggtaaattgcccggcggtaaacggaagcacgggggcgtgaacggtgagactaaacagggcgtcggtccagttctgcactttagtgactttgcctgttacccaatcagccatgtttttctcctgttttgattgacttgccttatcttcgttctccgaacaaaaaaattccagtcccgaaggactggaaggctcaatcgatcaaatcaatcagaggatgtgcacctgcatttccgggtctttgcgatccagatagtggatggactgaatgcggcgaatggtgcgtgacttgccgcggatcagcagcgtttcggtagtcgcgatattgcctttgcggctaatgccttccagcagatcgcctttggtaataccggtggcagagaagatgacgttatcgctgcgcgccatatcgcccaggcgcaatactttaccggcttcgatgcccatcgctttgcagcgtgccagctcctgctcgccaatgcgacgattctcttcgttgtcgcctttgacgtcatgacgcgccagcagacgaccgttcatgtcgccatctaatgcgcggatcaccgccgcagaaactacgccttccggcgcgccaccaataccgtacagcacgtcaacttcgctgtctggcatacaggtgagaattgaggccgcaacgtcgccgtccggaatagcaaatacgcgtacgccgagttgctgcatttcagcgataacggcatcgtggcgtggtttagccagaatcgttaccgtcagttcgctcaacggtttgccgagcgccgccgctacattgcgcaggttatccgccagcggcaggttcagatcaatggtgcctttggctcccggcccgacaatcagcttctccatatacatatccggcgcattgaggaagcagcctttatcgcctactgccagcaccgccagcgcgttagcctggcccatcgccgtcatgcgcgtgccttcaatcggatcaacagcaatatctaccgcgtcgccgcgaccagtaccgactttttcaccaatgtagagcatcggtgcttcgtcgatttcaccttcaccaatgacgatggtgccgtcaatgttgacctggttgagcataatacgcatggcgtttaccgccgcgccgtccgcggtgtttttatcgccgcgtcctaaccatttgtagccagccagcgccgctgattcggtgacgcgggaaaattcgatggcaagttctcgtctcatagcaaactctaagcagtaaggaatggcgcgaagtgtagcacaggggaagggagggattattgatgtgtgcggggttgcccccgcacgtttcgggactaccggatgcggcataaacgcttcattcggcatttacattattcgtcgtgttcttcccacgccatcgcgcgtttaaccgcttttttccagcctgcgtaacggtaattacgctcagtggtttcgatgcctggacggaactcgcgctcaatcaccgctttctcttgcagctcgtcgaggttctgccagaagccaaccgccaggcctgcgagataggccgcacccaatgcggtgacttcgcgcacttccgggcgctcaacgcgggtgccgagaatatcggactggaactgcatcaggaaattgtttgctactgcgccaccatccacgcgcagggcgtgcagacggataccagagtcggcctgcatcgcttccagcacgtcacgcgtctgataagcaatagactccagcgtcgcgcgtataatgtggttagcgttcaccccacgagtcagaccgaaaatcgccccgcgcgcatacgggtcccagtacggcgcacccagcccggtaaatgccggaaccacatacacaccattggtgttttgcactttggtggcgaaatattcggaatcgtaggcgtcgttaatcaacttcatttcatcgcgcagccactgaatggatgcgcctgccataaacaccgcaccttccaacgcatagttcacttcgccagtcgggccgcaggcgatggtggtcagcaggccgttttctgatttcaccgctttctcgccagtgttcatcagcataaagcagccagtgccataggtgttcttcgccatcccttctttcacgcacaactgaccaaacagcgcggcctgctggtcaccggcgatcccggagattggaatacgcgtgccgcctttgccgccaatgttagtctgaccgtatacttcggaagaacgacgcacttctggcagcatctcgcgcggaatatccagcacttccagcattttgtcgtcccagtccagggtatggatgttgaacaacatggtacgagaggcgttggtgtaatcggtcacatggacacggccctgagtcattttccagataagccacgtatcaaccgtaccaaacagcaattcaccacgacgtgcacgctcgcgagagccttccacatggtcgaggatccacttcactttggtgccagaaaagtacgggtcaatcaccagaccggtattgctgcggatataatcttctaaaccgtcacgttttaaatgctcgcagatttctgcggtacgacggcactgccagacaatggcgttatagataggcttgccggtttctttttcccagacaatagtggtttcacgctggttcgtaataccgatagctgcaatttgatcggaactgatatcggctttcgccagcacttctaccagcgtggagctttgggtggcccagatttccattgggtcgtgttctacccaacctggttttgggtagatttgctcaaattcgcgctgcgacacgctaatgatattggcatcgtgatccattacgaccgcgcgggagctggtggtgccctggtcgagcgcaacgatatattttttttcagtcatgtttaattgtcccgtagtcatattacagcgaagctttttgttctgaaggagttgtggtttccttttcttccacaacacagatatcgcaaggcaaatggcgaccaatcagtttgcggtaggcaaatgcacctacaatcgcgccaacgatagggccgaaaagcggcaccaggaagtaaggaatgtctctgccgccggtaaaggcgacattgccccagcccgccagccaggcaaagactttcggaccgaagtcacgcgctgggttcatggcaaaacctgtcaatgggcccatagatgcgccaatgaccgcaatcagtagaccaatcagcaagggagccaaagggccgcgtggtacaccgttgccatcgtccgttaacgccaggatcagccccatcagaatagcggtaatcaccatctcaactgcgaaagcctgcacaaaattgatatgaggattagggtaagtagagaaagtgccagccagatcaacactttcaacgctgccgcgaacaatgtgatgagtctgctcgaagtcgaaaaataaattgtagtaaagcccgtaaactaaagccgcagcacagaaagcgccggcaacttgtgaaacgataaaaggaataactttgcgcttgtcgaaacaggcaaacagccacaatgcaatggtaacagcgggattaagatgcgcgccggaaacccctgcggtcaggtagatggccattgccacccccagtccccaaatgacactgatttcccactgaccaaaagacgcaccagcgacttttagtgctgcaacgcaacccacaccgaagaaaatcaacaacccggtaccgaggaattcagcaatgcactggcctttcaaggttgatgtttgactcataatcggatcctgaagagttaatgtttgttgtatgcgtgaaagtcacggacctccacgatgcttgtaggcatgctgtaaacttatcgttaacgagcaaaaacgagaaatatcgaacttaaaatgtgtgtgcctcgtcataaaatgagcgttatcgcgccatttattccatctgattgtacatgatgcatgtttgttagatcattcgcgcaacaaatttattaacattttcgattgatgtggattatgtcaccaggagaaggatgaaaagtgtggcaaaccgtaatctgcaaggcgtgccgctggacagcgatggcgcggcttcatacaatcggagctaactaaagtgcgctcgtatttattaaggcgtcaccggtaatcgggacgaggatttttatccatcaacgccttgcaattcaggagaggtatgacaatgtcattagaagtgtttgagaaactggaagcaaaagtacagcaggcgattgataccatcactctgttgcagatggaaatcgaagagctgaaagaaaaaaacaactcactgtcgcaggaagttcaaaatgcccagcatcagcgcgaagagctggagcgtgagaacaaccatctgaaagaacagcagaacggctggcaggaacgtctgcaggccctgctgggtcgcatggaagaggtctgattacgcttcatcttccgcgtaatttctttactgtgtaggccaacaggtaacgcagaaaaaaggcaccttgcggtgcctttcttatcattcaatatccagcggatcttctgaaagaataatcccggtattgtcggcataaagatggtcgccggagaagaaggtgacaccgccaaaattgacgcggacatcgctttcgccaatgccttcgccagcggcaccaaccggaattgccgccatcgcctggatgccgatatccaactcttccaggtcatctacctgacgcaccgcgccgtaaatgaccagaccttcccattcattttgtactgccagacgcgccagttcagcatcgaccagtgcgcgacgaacagaaccaccgccatcgacgacaagaacacgaccacggccattctgttcgagcagatcgtacagcaacccgttgtcctcgaaacattttaccgtgattatttgtccgccaaacgacgcccgtccgccaaagttggagaacagcggttccacgacgttaacatcttcttgatagatgtcacaaagctcggaagtatcgtatttcataggcttaacattcagttgctgcgagaattttcagtatatcgcgctatgtgggctgttggcaaaatcatcaattgttaattgatatttgtcagttatgctgcccactggcttaggaatatccctaaaacaaacagcaggttagtcagtaacgctcccttgacagtacgttccagcattggtcgcatcgccaccgggtccatttcccgcatcacataacgggcttgcttcaccagtaatggtgccgccagcaggaacagccagccccacaggctatgcagcgaaaagagattaaacagcgccagacacaccagcgagcccatcagcaggcaggcatgataacgacgcgcgttcacttcacctaagcgcaccaccagcgtgtttttgccattttcgcggtcgctattgatatcacgcaggttattaatattcagtactgccgttgccagcaggccgcatgcggtcgccggaaggatcagtgccggaatcaatgtatgagcctgtaaataccagctccccatgacactcaaccagccaaagaaaaccagtacggaaatatcacccagaccgatataaccataaggacgattgcccacggtgtaggtgatagcggcaatgatcgacaacccgccaagaatcaggaaaccgacaaaatcggccagcgtatggcatgccactgcaaccagtgccagcccggagagacagatgagcacgacggtaataatgagcgcccgtttcatctcttgctgggtaatgacccctttttgcatgccgcgtagcggcccaatgcggtcaggtttatcgctgccttttaccgcatcgccgtaatcattggcgaggttagaaaggatctgtaatagcccggcggtaattagtgccagcagggcgaccagcggatcgaagtgaccttgccaccatgccagcgctgtcccgacgataattgcagcaaaggcgagggggagggttttaggtcgtaaactttccagccacgcctgagttcggctaatttgttgttcagtcataatacgcgccaataaaaatggggcctttcagccccatcaaacaatgatgaaaatgattgaacgcgattataggataaaacggctcagatcttcatctgccaccaacgcatccagatgtttgctcacataatctgcgtcaatagtgatattttgaccgcttaaatcgctggcgtcgtaggaaatctcttccattaaacgctccagaacagtgtgtaaacgacgagcaccgatgttttcggtagattcgttcacctgccatgccgcttccgcgatgcgtttaataccggagtcggtaaactcgatatttacgccttcagtcgccatcagtgctttgtactgcacggtgatagaggcattcggctcggtcagaatacgctcgaagtcgctggtggtcagcgcctgcagttcaacgcggattggcagacgaccttgcagttccgggatcaggtcagacggtttcgcaatctggaacgcgccagaagcgataaacagaatgtggtcagttttgaccatcccgtgtttggtggaaacggtgcaaccttctaccagcggcagcaggtcacgctgaacgccttcacgagaaacatccggaccggaagactcgccgcgcttacagattttgtcgatttcgtcgataaacacgatcccgtgctgctcaacagcgtcgatagcgtcttgcttcagctcttccgggttcaccagtttcgccgcttcttcttcaatcagcagcttcatggcgtctttgattttcagcttacgcgctttttgcttctggccgcccaggttctggaacatggactgcagctggctggtcatctcttccatgcccggaggagccataatttcaacgcccatcggtgctgcggcaagatcgatctcgatttctttgtcatcaagctggccttcacgcagttttttgcggaatgcctgacgagcagcggacggttcctgctgctgttcggtctgtccccagttgtttttagcaggtgggatcagcacgtcgagaatacgttcttctgccagttcttcagcgcgataacggtttttctcgatagcctggacgcgtaccattttcacggcggcatcggtcagatcgcgaataatagaatccacttccttaccgacgtagcccacttcggtgaatttggtcgcttcaactttgatgaacggcgcattcgccagcttagccagacgacgggcgatttcagttttaccgacaccggtcgggccgatcatcaggatatttttcggggtcacttcatggcgcagctcttcgttgagctgcatgcgacgccagcggttacgcagagcaatcgccacagaacgcttggcgttgtcctggccgatgatgtgcttatccagttcgctgacgatttcgcgtggggtcatttcagacatgggagatccttacgctttgtagcttaattcttcgatggtgtggaaatggttggtatagatgcaaatgtcgcctgcaatatccaacgccttttcagcaatttcacgggcgctaagttcagtgttttctaacagcgcgcgcgccgcagcctgggcgtaagggccgccggagccgatagcaataagatcgttttctggctgcaccacgtcaccgttaccggtgatgataagcgatgcagtttcatccgcgactgccagcagtgcttcaagtttgcgcagcatgcgatcggtacgccagtcttttgccagctcaacggcggctttgaccagatggccctgatgcatttccagtttacgttcaaacagttcgaacagcgtaaaagcatccgcagtaccgcccgcaaagcccgcgatgactttgtcgttgtacagacggcggacctttttcacgttgcctttcattacggtattgcccaacgtggcctgaccatcaccagcgatgaccacatggccgttacggcgtacgcttactatagttgtcacgagctgaccccttggttacgaatacagagtacaaaccccgtacaaaagtacggggcataatgcaattatagatgggggggattttgagggtttcaacccccggcggcgagccgaatgcagtttgtatgacccgccatcttcaaccgattgagggtgctgtctgcgttctctttgcctttcaccgggccaatgaccacacgattccagccattgttggtggtgattttcgagtcaaagccttcgaacgccagctgagcacgtaccgtctctgcctgttccgcgcctctgaacgaaccgcactgcaccatccagcggcgttcgtcttttttctccgccgtcggttttggcgcgtcagcggcacgagcaactggcgcagcttgctgcggcttcgactgcgcagtcgtgtgcgcaggagtttgcagcagatcctggtacggctgctgagaagaagccggtttagactggcgcggttgcgcctgtaccggtgcggcttgcgacgtacgcgtctgctgctgccagctttgttcagtcgtacgcgactgctgagccaggcgttgctgttccgctaattgctgcgcctgacgttggcgctgtagcgtttgctgacgctgttccggcgtctgttcattccacggaacttcaaccagctgcgttggctgctggcgcatatcagcctgcatttgttcaagaagctgacgttgttctggtgtcagttgctccggcgttttcacttcaccaccggcagaaggttctgtgggcgcacgcactcccggctggcgactttccagctctttaatgtagcgccagcgttcttctggttttggtggtagtccgtttccggtcactttctggctttgcagcgtctcggactcttctttcttgtgatgcgtaatgaagtacagaccaccgataaaggtcacaagaacggcggcagcaatagcgaccatagcgggagaaaccgcaggcagatttcgttgctttttccgtgaggtgctcttttttcgccgcgaaggtgccggttggctgcggcgtacataatctcgttgtgccactatcgtttcgctgtatttattcgttcgtcagcccgccatgttacttaagcggcgggcctttgaccagtcacggcagtcttaaaggtttactttaaggtaacgcgcgtgttgatccccggatgataagttcgcagtccattaaacgagagccactgccaacgtgttgcccctgcatttgatcaagcaataacagcatagcttcccgaccgatttcgtaacgcggctgcgcgatggttgtcagcggcggatcacaaaattgcgtcaggtcgatgttatcaaaaccgattatggaaaggtcttccgggactttcagcccctggcgttttgcctgagaaagtgcgccgagcgccatcacatcgctatggcagaagacagcagtaggcggttgtggaagatcaagcagctgctgcatcgctttgcttccggcttcgaaggtgaagtcgccacgggcgatgtattgcggatcaaccataatgccgcagcgacgcagcgcctgaacatagccttgcaggcggtagtgacacagcggcatctcttcgggaccggctatacagccaatccgtttatgcccttgctcatataaataatttactgcatcaaatgcggcggtcagattgtcgatatgaactgtaggcagctccagctccggtgcaaattcgttcgccatcaccatcggcggcagattacgctgttcctcaatgctggcatcaaacggcagccttgaacccagcaacaacatgccatcaatttgcttggtgatgatcaaatcgataaaggttttttcctgctgattttgatgcgcacagtcgccaatcagcaccagatatccgtgatttgccgccgtaacttcgataccgcgaataatttcgctaaagaagggatcgcagatatccgggacaatcaccagaatggtgcgggattcattacgcttgacgttgcgccccataggctgcggtaaataacccacttcccgggccgctttttcaacccgattacgggtggcctgggagactttatcgggattcattaatgctcgggagacggtcgctgtagagacttttgccttgagggcaacgtctttcatggtcgcggcagtttcctgcttcttcgctttcacactcactcctcgcctggcacgtcaggcgtactacatccatgtttacttcacatcggcaacatttttagcagatagcgcgtgaaaacggttacagaattttcatgaaaagtgtgatgaatattgaatttttcgatccgcctcgcatcgtgagcggtttaaccctcaatcggatcaacatccagcacccatttcaccttacgggaatccggtattgtattgatgagcgccagcgtaccgttaatgatgtgttgcaagcgcacgcgggaagggtgctgcaacaatatctgccagcgccagcgaccgccacgtttaggtgccagagccggaaccggaccgagaacccacagtttctcgtctgccagtgggctggagaggatcagattacgcagttgttgcaggaacaatggcgcgtgctgattgttatgatcttccgcacgcacaatcacatggctggtccacggcggtagctgcatcattcgccgctcagccagcgcctgttcggcaaaggcgtcgtagcctttatagagcaacgtttgcaacagaggatgttccggatggtgcgtttgcagcaccacttcgccctgtttacccgcacgcccggcacgaccggcgacctgggtgtaaagctgagcgaaacgctctgccgagcgaaaatcggcagaaaacagcgcgccgtccacgtccagtaatgcaaccagcgtcacatccgggaaatggtgacctttcgccagcatttgtgtaccaatcaaaatccgcgcgccgccgcgatgtacttctgccagttgctgttccagcgcccctttgcggctggtggtatcgcggtcgatacgagaaatgggcacgccggggaacaacggcgcgagcgtctgttcaagctgttcggtgcccagccccacggggaccaggtgcgtggaaccgcaggaagggcactggcgcggcaccggacgctgactgtcacagtggtggcagcgcagatggtgctgcgcctgatgcagcgtgtagtagtgatcgcaacgtgggcattcggcaatccagccacagtcgtggcacagcagtgcaggcgcaaagccacggcggttaagaaagagaatgacctggttatcagcctgtaaatgctggcgcatacgagtgattaacgccggagccagacctgcctgcaccttctgaccttttaaatccagcacatgttgaattgccggacgcgcattccctgcccgacgggtcaggcgcagcaggcggtattttttctgctggacgttgcataacgtttccagcgcgggcgttgcggagccaagaataatcgggatttgctcgctgtgcgcacgatacaccgccaggtcgcgggcatgatagcgccagccttcctgctgcttgtaggagctgtcgtgctcttcatcaatgacaatcacgccgagatttttaaacggcgtaaacagcgcggagcgggtgccgatcacaatcgccgcctcaccatttttcgctttcagccacgccgaaagacgctcgctgtcgttcaggccggaatgcagaacttccacgggggcattaaaacgttcacgaaaacgggcgatagtttgcggtgtcaggccgatttccggcaccatcaccagcgcctgtttgccctgagcgagcacgttttccagtacgctgagataaacctccgttttaccggaaccggtaacgcccgccagcagccaggcagaaaaagtatctgccgcgctatgaattgcgccaacggcggtggcctgttcggtattcaatcgcaaccgctcaccagaaacggcatagttcgttcgccagtcgctaaactctggtgtttcacttgctaaatcacacagaccttttttgcgtagcgcctgcaacgcggcatcattaaattcgagcgtggcgacctggtcgcgccagattttgccttgccgtaacgccgccagcgcctgttgttgcttgggggagcgtttcaggctgttcagatccaccgcctggccttgttcagtggcaaaccagtaccacatcggcgcgttcgccgcaggccgcccctggcgtagtaaaatcggcaaggcatgaaacagcacatcgccaatcggatgatgatagtaatctgccgcccatagcagcaatcgccagacggagtgagtaaacaccggctcactatccagcacttcgactaccgcttttagctcattgagcggcagttcgctggcatcgctaactgataccacaatcccgatgcgctcctgctgtttgccaaacggcacgcgcacgcgacacccagctttaaccgtcatgccttctggcagcagatagtcaaaggtacgaggaagcggaacgggcaaggcaacgtgggcaacgggcatagcatcatcctgacttgaaattcggtgggttagtatacacattgccgtagaagagtgcggatcagtttgcatacgctggttaatttctgtatgatttcgcgccttcgtacgaaatgatcgtattgaagctatacttttaacatcgcgtggtgtctggcgttagggctggaagagcgacgcggccttaaaccgaggttttcccatgaaaaaagatattcacccgaaatacgaagaaattactgctagctgctcttgcggtaacgtaatgaaaatccgctccaccgttggtcatgacctgaacctcgacgtgtgcagcaagtgccacccgttcttcactggcaaacagcgtgatgttgctaccggtggccgtgttgaccgcttcaacaagcgtttcaacatcccgggcagcaaataagaccggatttccgaaaaaagcgccgcacggcgctttttttgtgcctgaattttggtcgtattaccacgaaaacagcggccattctttggcgaccgtggtgagttgtggcgcatcgaaaacggcttgtggcgagaccaccgtttcctcaagcggaatattcttgccgtaacgttctttgagctttgcctgaacttgtgggctgctcaggtcgaactctttcaacttctgctgctcgcccacgcgcattcccagcgcgttctggtaaaccttccacaccacttccgaacagtactggcgatcgtcgctccatgagaagctgaaatcatacggtttaccgagataacgttttgccgtttgcgccagtttttgctgttgttcaacactcagtccgccttcaacgcggcgaacaacgtatttgcccttttcaccatgggcgatccactgcttgagcggggtgtatttcaccgggccgactgcttcaaaaacgtagggctttttgttgcgtatcaccagcataccggtgtggctataatcggtatgggtcgccagttggatcgctttactttgcgatgagcgagagatctgaaagatgatgtcgccggtttgtggctgccaggcaaaggcaggtacagaaaccagcaggctgaggatcagcagcctgtttttcatagttaaacgtccatgtataaaaagcggtgggtcgcagacaacgtgctcgttgtttatgccggatgcggcgtgaacgccttatccggcctacaagttcgtgcaaattcaataaattgcaatatgacgtaggcctgataagcgtagcgcatcaggcgattccactccgcgccgctcttttttgctttagtattcccacgtctccgggttaatccccatctcacgcatgatctcttttgccgcttccgggatttcgtcgctgcgctctttacgcagatcggcatcatccggcaaaggttgcccggtaaaggcatgcagaaacgcttcgcacagcagctcgctgttggtagcgtgacgcaggttgttcacctgacgacgcgtgcgttcatcggtgaggatttttaacaccttaagaggaatggaaaccgtaatctttttgacttgttcactcttcttgccgtgctcagcgtatgggctgatatattcgccgctccattcagccatgagatacttaatcctcttcgtcaataaattgagaccagaccacacagttgatgtgggtactgaccgtaaacccgcatagtttaccgtacaggcgttaccgtgacatcgtgtaatgcacctgtcggcgtgataatgcatataattttaacggctatttgggatttgctcaatctatacgcaaagaagtttagatgtccagatgtattgacgtccattaacacaatgtttactctggtgcctgacatttcaccgacaaagcccagggaacttcatcacatgacgcgtaaacaggccaccatcgcagtgcgtagcgggttaaatgacgacgaacagtatggttgcgttgtcccaccgatccatctttccagcacctataactttaccggatttaatgaaccgcgcgcgcatgattactcgcgtcgcggcaacccaacgcgcgatgtggttcagcgtgcgctggcagaactggaaggtggtgctggtgcagtacttactaataccggcatgtccgcgattcacctggtaacgaccgtctttttgaaacctggcgatctgctggttgcgccgcacgactgctacggcggtagctatcgcctgttcgacagtctggcgaaacgcggttgctatcgcgtgttgtttgttgatcaaggcgatgaacaggcattacgggcagcgctggcagaaaaacccaaactggtactggtagaaagcccaagtaatccattgttacgcgtcgtggatattgcgaaaatctgccatctggcaagggaagtcggggcggtgagcgtggtggataacaccttcttaagcccggcattacaaaatccgctggcattaggtgccgatctggtgttgcattcatgcacgaaatatctgaacggtcactcagacgtagtggccggcgtggtgattgctaaagacccggacgttgtcactgaactggcctggtgggcaaacaatattggcgtgacgggcggcgcgtttgacagctatctgctgctacgtgggttgcgaacgctggtgccgcgtatggagctggcgcagcgcaacgcgcaggcgattgtgaaatacctgcaaacccagccgttggtgaaaaaactgtatcacccgtcgttgccggaaaatcaggggcatgaaattgccgcgcgccagcaaaaaggctttggcgcaatgttgagttttgaactggatggcgatgagcagacgctgcgtcgtttcctgggcgggctgtcgttgtttacgctggcggaatcattagggggagtggaaagtttaatctctcacgccgcaaccatgacacatgcaggcatggcaccagaagcgcgtgctgccgccgggatctccgagacgctgctgcgtatctccaccggtattgaagatggcgaagatttaattgccgacctggaaaatggcttccgggctgcaaacaaggggtaaaaatgagtgtgattgcgcaggcaggggcgaaaggtcgtcagctgcataaatttggtggcagtagtctggctgatgtgaagtgttatttgcgtgtcgcgggcattatggcggagtactctcagcctgacgatatgatggtggtttccgccgccggtagcaccactaaccagttgattaactggttgaaactaagccagaccgatcgtctctctgcgcatcaggttcaacaaacgctgcgtcgctatcagtgcgatctgattagcggtctgctacccgctgaagaagccgatagcctcattagcgcttttgtcagcgaccttgagcgcctggcggcgctgctcgacagcggtattaacgacgcagtgtatgcggaagtggtgggccacggggaagtatggtcggcacgtctgatgtctgcggtacttaatcaacaagggctgccagcggcctggcttgatgcccgcgagtttttacgcgctgaacgcgccgcacaaccgcaggttgatgaagggctttcttacccgttgctgcaacagctgctggtgcaacatccgggcaaacgtctggtggtgaccggatttatcagccgcaacaacgccggtgaaacggtgctgctggggcgtaacggttccgactattccgcgacacaaatcggtgcgctggcgggtgtttctcgcgtaaccatctggagcgacgtcgccggggtatacagtgccgacccgcgtaaagtgaaagatgcctgcctgctgccgttgctgcgtctggatgaggccagcgaactggcgcgcctggcggctcccgttcttcacgcccgtactttacagccggtttctggcagcgaaatcgacctgcaactgcgctgtagctacacgccggatcaaggttccacgcgcattgaacgcgtgctggcctccggtactggtgcgcgtattgtcaccagccacgatgatgtctgtttgattgagtttcaggtgcccgccagtcaggatttcaaactggcgcataaagagatcgaccaaatcctgaaacgcgcgcaggtacgcccgctggcggttggcgtacataacgatcgccagttgctgcaattttgctacacctcagaagtggccgacagtgcgctgaaaatcctcgacgaagcgggattacctggcgaactgcgcctgcgtcaggggctggcgctggtggcgatggtcggtgcaggcgtcacccgtaacccgctgcattgccaccgcttctggcagcaactgaaaggccagccggtcgaatttacctggcagtccgatgacggcatcagcctggtggcagtactgcgcaccggcccgaccgaaagcctgattcaggggctgcatcagtccgtcttccgcgcagaaaaacgcatcggcctggtattgttcggtaagggcaatatcggttcccgttggctggaactgttcgcccgtgagcagagcacgctttcggcacgtaccggctttgagtttgtgctggcaggtgtggtggacagccgccgcagcctgttgagctatgacgggctggacgccagccgcgcgttagccttcttcaacgatgaagcggttgagcaggatgaagagtcgttgttcctgtggatgcgcgcccatccgtatgatgatttagtggtgctggacgttaccgccagccagcagcttgctgatcagtatcttgatttcgccagccacggtttccacgttatcagcgccaacaaactggcgggagccagcgacagcaataaatatcgccagatccacgacgccttcgaaaaaaccgggcgtcactggctgtacaatgccaccgtcggtgcgggcttgccgatcaaccacaccgtgcgcgatctgatcgacagcggcgatactattttgtcgatcagcgggatcttctccggcacgctctcctggctgttcctgcaattcgacggtagcgtgccgtttaccgagctggtggatcaggcgtggcagcagggcttaaccgaacctgacccgcgtgacgatctctctggcaaagacgtgatgcgcaagctggtgattctggcgcgtgaagcaggttacaacatcgaaccggatcaggtacgtgtggaatcgctggtgcctgctcattgcgaaggcggcagcatcgaccatttctttgaaaatggcgatgaactgaacgagcagatggtgcaacggctggaagcggcccgcgaaatggggctggtgctgcgctacgtggcgcgtttcgatgccaacggtaaagcgcgtgtaggcgtggaagcggtgcgtgaagatcatccgttggcatcactgctgccgtgcgataacgtctttgccatcgaaagccgctggtatcgcgataaccctctggtgatccgcggacctggcgctgggcgcgacgtcaccgccggggcgattcagtcggatatcaaccggctggcacagttgttgtaatttcagaaatttaataatgcccggtactcatgttttcgggtttatggtttctaatgaaatatattgaattatcataggattaggccggattaagcgtttacgacgaatccggcaagaagcaataagtacatggttagtttatatttgcagtccggtttgctttgcataccggattttctttttcttaccatcctgaagttttttcatcttccctgatttttcctcaccatcattggtcatttttcggttgacgcccttcggcttttccttcatctttacatctggacgtctaaacggatagatgtgcacaacacaacatataactacaagcgattgatgaggtaaggtatgagcttttttcacgccagccagcgggatgccctgaatcagagcctggcagaagtccaggggcagattaacgtttcgttcgagtttttcccgccgcgtaccagtgaaatggagcagaccctgtggaactccatcgatcgccttagcagcctgaaaccgaagtttgtatcggtgacctatggcgcgaactccggcgagcgcgaccgtacgcacagcattattaaaggcattaaagatcgcactggtctggaagcggcaccgcatcttacttgcattgatgcgacgcccgacgagctgcgcaccattgcacgcgactactggaataacggtattcgtcatatcgtggcgctgcgtggcgatctgccgccgggaagtggtaagccagaaatgtatgcttctgacctggtgacgctgttaaaagaagtggcagatttcgatatctccgtggcggcgtatccggaagttcacccggaagcaaaaagcgctcaggcggatttgcttaatctgaaacgcaaagtggatgccggagccaaccgcgcgattactcagttcttcttcgatgtcgaaagctacctgcgttttcgtgaccgctgtgtatcggcgggcattgatgtggaaattattccgggaattttgccggtatctaactttaaacaggcgaagaaatttgccgatatgaccaacgtgcgtattccggcgtggatggcgcaaatgttcgacggtctggatgatgatgccgaaacccgcaaactggttggcgcgaatattgccatggatatggtgaagattttaagccgtgaaggagtgaaagatttccacttctatacgcttaaccgtgctgaaatgagttacgcgatttgccatacgctgggggttcgacctggtttataaatagtgtggcttttgtgaaaatcacacagtgatcacaaattttaaacagagcacaaaatgctgcctcgaaatgagggcgggaaaataaggttatcagccttgttttctccctcattacttgaaggatatgaagctaaaacccttttttataaagcatttgtccgaattcggacataatcaaaaaagcttaattaagatcaatttgatctacatctctttaaccaacaatatgtaagatctcaactatcgcatccgtggattaattcaattataacttctctctaacgctgtgtatcgtaacggtaacactgtagaggggagcacattgatgagcacgtcagacgatatccataacaccacagccactggcaaatgcccgttccatcagggcggtcacgaccagagtgcgggggcgggcacaaccactcgcgactggtggccaaatcaacttcgtgttgacctgttaaaccaacattctaatcgttctaacccactgggtgaggactttgactaccgcaaagaattcagcaaattagattactacggcctgaaaaaagatctgaaagccctgttgacagaatctcaaccgtggtggccagccgactggggcagttacgccggtctgtttattcgtatggcctggcacggcgcggggacttaccgttcaatcgatggacgcggtggcgcgggtcgtggtcagcaacgttttgcaccgctgaactcctggccggataacgtaagcctcgataaagcgcgtcgcctgttgtggccaatcaaacagaaatatggtcagaaaatctcctgggccgacctgtttatcctcgcgggtaacgtggcgctagaaaactccggcttccgtaccttcggttttggtgccggtcgtgaagacgtctgggaaccggatctggatgttaactggggtgatgaaaaagcctggctgactcaccgtcatccggaagcgctggcgaaagcaccgctgggtgcaaccgagatgggtctgatttacgttaacccggaaggcccggatcacagcggcgaaccgctttctgcggcagcagctatccgcgcgaccttcggcaacatgggcatgaacgacgaagaaaccgtggcgctgattgcgggtggtcatacgctgggtaaaacccacggtgccggtccgacatcaaatgtaggtcctgatccagaagctgcaccgattgaagaacaaggtttaggttgggcgagcacttacggcagcggcgttggcgcagatgccattacctctggtctggaagtagtctggacccagacgccgacccagtggagcaactatttcttcgagaacctgttcaagtatgagtgggtacagacccgcagcccggctggcgcaatccagttcgaagcggtagacgcaccggaaattatcccggatccgtttgatccgtcgaagaaacgtaaaccgacaatgctggtgaccgacctgacgctgcgttttgatcctgagttcgagaagatctctcgtcgtttcctcaacgatccgcaggcgttcaacgaagcctttgcccgtgcctggttcaaactgacgcacagggatatggggccgaaatctcgctacatcgggccggaagtgccgaaagaagatctgatctggcaagatccgctgccgcagccgatctacaacccgaccgagcaggacattatcgatctgaaattcgcgattgcggattctggtctgtctgttagtgagctggtatcggtggcctgggcatctgcttctaccttccgtggtggcgacaaacgcggtggtgccaacggtgcgcgtctggcattaatgccgcagcgcgactgggatgtgaacgccgcagccgttcgtgctctgcctgttctggagaaaatccagaaagagtctggtaaagcctcgctggcggatatcatagtgctggctggtgtggttggtgttgagaaagccgcaagcgccgcaggtttgagcattcatgtaccgtttgcgccgggtcgcgttgatgcgcgtcaggatcagactgacattgagatgtttgagctgctggagccaattgctgacggtttccgtaactatcgcgctcgtctggacgtttccaccaccgagtcactgctgatcgacaaagcacagcaactgacgctgaccgcgccggaaatgactgcgctggtgggcggcatgcgtgtactgggtgccaacttcgatggcagcaaaaacggcgtcttcactgaccgcgttggcgtattgagcaatgacttcttcgtgaacttgctggatatgcgttacgagtggaaagcgaccgacgaatcgaaagagctgttcgaaggccgtgaccgtgaaaccggcgaagtgaaatttacggccagccgtgcggatctggtgtttggttctaactccgtcctgcgtgcggtggcggaagtttacgccagtagcgatgcccacgagaagtttgttaaagacttcgtggcggcatgggtgaaagtgatgaacctcgaccgtttcgacctgctgtaatctgaccccgttcagcggctgcttgctggcagtcgctgaacgttctttaccagcgtatagtgggcgaacgaaaactacacactggatctctcatgtctgccgcaggaaagagcaacccactggcaatcagtggcctggttgtgctcacacttatctggagttatagctggattttcatgaagcaagtcaccagttacatcggtgccttcgactttaccgccttacgctgcattttcggcgctctcgttttattcatcgtccttttattacgtggtcgcggaatgcgcccgacaccgtttaaatacaccttagccattgccctgttacaaacctgcgggatggttggtctggcgcagtgggcgttggtcagcggaggtgcggggaaggtggcgatcctgagctataccatgccgttctgggtggtgattttcgccgcgttgtttctcggtgaacgcctgcgacgtgggcaatatttcgcgattctgattgccgctttcggcttatttttggtgttgcagccgtggcaactcgatttctcttcgatgaaaagtgccatgctggcaatcctctccggcgtcagttggggggcgagcgcgattgttgctaaacgtctgtatgcccgtcatccgcgcgtggatttattgtcgttaacatcctggcagatgctgtatgcggcgctggtgatgagtgtggtcgctttactggtgccgcaacgtgaaattgactggcagcccaccgtgttctgggcgctggcctacagtgcgattctggcgacggcactggcgtggagcttatggttgtttgtattgaaaaacttgcctgccagtattgccagcttaagcacactggccgttcccgtttgcggcgtactcttttcctggtggctgctcggcgagaatccgggggccgttgaaggtagcggtattgtgctgattgtgctggcactggcgctggtgagccgtaagaaaaaagaagccgtcagtgtaaaaaggatctgaattttttcttcatgtggggcgatctcttatttaacaaaataacgataatgccccaccatccgccagttaaacagcacatcttcttcctgcgcgcctgcgccaatgttatgtatcaccagcggcgtaccgtcgcgggcgaagccatctgaaaccaccccaatatgtgccagcccgttatccagtcgccaggagacaatatcgcccgcttgatagtcactggggttcttgctggtggggcgtgttttatcatggcggctaaaccaggtttccagattaggcacccgacggtgatcgatgttgctgtccgggcgctttaacttccatttttgcgggtactcagcaaaattcttcgccatatcttcgtgaaccagtttctgcaaatcgaccttctggctgcgcaatgcgcggatcaccacatcggaacatacaccgcgttcttgcggaacatcaccgccaggataagtaagctgcacatacgccggatcgtaaaatagcgtgctgccaatttgctgtctggcaccgtctgcgatggcaaggttggtattggcctggatttgtaccacggttggtggaacggcgggagattttaaggagtggctggtaaatgccgttagcaggctgagcagcgccagtgaagctttcatctggttcgtccgtgaaaataagagtcacagattcgaccttccgggctaacgattgttctgtagagaaaatgtccagaagcggataaaaaattcctgaacaacgtgggagtttcagattactggcacagagtgccggatgcggagtgaacgccttatccggcctacaaaagcacgcaaattcaatatattgcagagattgcgtaggcctgataagcgtagcgcatcaggcaattttgcgttcaaactcccggacaagccgggagtttggagtaggttattcccactcttgcaggaaacgctgaccgtactggtcggctaccagcagagcggcgtaaacctgatctggcgtcgcgccgccaggcatgttgtgaatggtttcaccttctgcacatgccgcttctgccacaattcgcattttcgccgggacatcttctttaatatccagttgagcgagagttattggcaaacctaccgcatggctaagggcagctacggtttcgatttcctccaccggcgcattttccagaaccagctgcgtcagcgtaccgaatgccactttttcaccgtgataatagtgatgcgcgtccgggatagcggtcaggccgttatgcactgcgtgcgccgcagccagaccaccactttcaaaaccaacaccgctcaaataggtgttcgcttcaatcacgcgctccagcgccggagtcactacatgctgttcggcagcaagcatcgctttttcgccttcttccagcagggtgttgtagcacagttcagccagtgccagcgcagcctgggtgcacttgccgcccgccatggtggtcgcgccgctacgagagcaggcacgcgcttcaaaccaggttgccagcgcatcgccgatacccgccgctaacagacgtgcaggtgcgccagcgacgattttggtgtcgacaatgaccatattcgggttatttggcaacagcagatagcggtcaaactcaccctcatcggtgtagataacagacaatgcgctgcacggtgcatcggtagaggcgatagtcggtgcgatcgctaccggaacacccatgaaatgtgccagtgctttggcagtatcgagggtttttccgccaccgataccgagaattgcgccacactgcgcagtctccgcgatgccacgcagacggtcgatctcattttgcgaacattcaccgccaaacggcgcaatttctactaccagtccagcatctttaaagcttttctcgacagtggattgagcaaaacctaaaacaaatttgtcacccaccactaaccagcgttctgccagcggcttcaggtattcgcccagacgattaatcacatcagcgccctggatgtatttacccggtgattgaataatgcggtccataattgctcctttagagatgagtagtgccaaatgcggcattccagtcgtgttcgaacttctctatagctgactctaccgcaggggtgttgagcatttgttgcgctacatctaagggcagggtgatggattcacatcctgccagtaaacagtccagcgcctgacgcggcgttttaaagctggctgccagcaccatgctttctggcgcgtgcatttctaacagcgtttgcagctcctgaaccgtacgaatgccgtctccgccctgggcatctacgcggttaacatacggagcaacgtattttgcccctgccagtgcggctaataacccttgtgcggcgctatatacagcagtgccaagtgtagtaataccctcttttttcagtattttaattgctgccagaccttcggaagtcaccgggattttcaccacaatacccggaatagcgtcgcgcaggcgcttcgcttcttccaccatcccctgcgcgtcgcggctcatggtctgagcaaacagaatgccctcatcaccaatcgctttttgcagacgcggcagcacttcccatatggactccttgctggcagcgataatgctcgggttagttgtcaccccggcaatggggaatatgcgtgccagacgttcgacttctgcgacgttagcggtgtccagatacagttccatgatgtttccttttacagttccagttcatgttgcagcaggctggcgatagcgtcggcagaggcggcgttaaccagcgcgttacggaattcttcgtgcatgatgcggcgagcgaggcgcgagaaaatgcgcatatgctgatcgcccgcagcgtgtttgttcagggttaacataatgatgaattgcgcttcatcatcgccccagcgcaccggcgcttgcagacgcgccacgctgatggtggattgctcaatgtgttctgatttgctgtgtggaatggcaaaactaaagcccagaccggtagagaaaacggcctcgcgcgcccacaagtcggcttccagtttacgcggatagcggcagcggcccgccagcagcaggttatcggtcatgcctttgagcacttcttctttgctgcgccagtcgctttccagtgtgatgcactcggcggtgaccagcggtgcgtcttgttgggtcatgcggaattgcgccagcaggtgttctacttccagcgaagtacggcaggccattgcctggttgagcaacttgcggcactcacggctatcaagttgcgccatccgagctttcgccgccggaattgatggtgcgctcatgctgagttcatccagccctaagccgaccagcaacggcagcacggaacctttcgctcccagctcaccgcacagaccaatccatttgccctggcgatgcaccgcttgcacggcgtaatcgagcgcccgcaagaatgccggattcaggctgttgtagtgacgagtaaccttagcgttatcgcgatccaccgccagcagatactgcgtcaggtcattactaccaatactaaagaaatcaatctcttcgcagcattgatcgatgatgaacatcaccgacggcacttccagcatgatgccgagctggattttctcatcaaacggaatgtgttcgttacgtagttgctgtttggcttccgccagtttttctttcacccataagatctcttccattgaggagatcatcgggatcatgattttcaggctgccgtgagcggaggcgcggaggatcgaccgtagctgcgtggtaaacaacgacgcgtactcttcataaatacgcacggcgcgataaccgaggaacgggtttgcctctgcgggaatgttcagataatcaacgggtttgtcgccgccaatgtccatagtgcgcacaataatgctgcgtccgttggcggattccagcgcctgacaaaaaatgttgtacaactcgctttcgcccggtgcgctggtgcgatccatatagagcatttcagtgcggaacaaaccaacgccttccgcaccattgccgaatgcggcctgcgcttccacggagtgagcgatgttagcggcaatttcaatgcggataccgtcagcggtacgggcttgttgggtcagccagacacgctgttgctcacgcagggcgtcctgtacgcgggcttcttgctgataataacgagctacggcttcccctggctcaaccacaatcgccccggcgttgccgtcgatataaatcgtttgttgctgccacggagtaagggcatcaatatccacaccaaccagcgttggaatgttgaacgaacgggcaaggatcaccgtatgtgaggtggtgccgccgcttttgagcaacaatcctttgaggtgatttttatccagttcgaggaactggctgggggtcagttcatcagccatacaaatggcgggctgcgtcagtttgcccggtgccgggaagcgttgctcaccgtagatttgctggagtaactggaagcagacgtcgcgtacgtccagggcacgttcttgcaggtagctgctgctggaacgggaaaactcttcgcaaaagtgattcgcgctggcaacaattgcttcggcgcagcttaatccggcgctgacgcctgccagtaaatgttcgcgcagggaagtatcgccagccagggatcggtgagcttccagaatcgcgctggtagcaccgtcgctatccagcagacgaaactcaatgtttttcagtaccagcgtcaggccgttttccagtgcggattgctcggcgtcaacgcctttggctgcgggaagattacccagcgcattgagatctaaagaagagatcggcgtcagaatgccgcctgcactaccgctgcacacggtgcgggcgcggataatttgcggattcagattggtcagtgaaaccggcagtggttccagttcgtcagatttaacttccgccagcggcgcatcgcagtgggggaattcatcgcgcagccattggcttaaacgctggtgcgcttcctgttcgtcggccccggaaatcagtaactggcagttatcgcccgccagcgtatcggtgccaatcagcgcaagggcgcttttggcgttgcccttgcggtcagtgcgcaggttatgccactcaatttgtgatgaaaaagtattacacagcgtttcaacgtggcttgccggacgcgcatgtacgccgttaggtagctcacaaataaattccacaatcagggccattgcctctctcccggtacggttttctgtttacaggataagagcgcacggcaacggcctgccatgtgacaaatctgccaaaagctggacaaatgtaatgtaaccgtcaatttgcgacgcgtctcacaagacgctgttttgcggcatgcttccggtttatcgcaagttatgaggcggatcgcatttttgtactgatattacaaaagtccagtaaatggcctttttatccactgtttgctccgcctgcgattgcctattgtttcctccatcaaaaatatggacatgggctttcgcaagcccgggagcagcttatgaatgagttggtgcagatcctgaaaaatacccgtcagcatttaatgacgggcgtttcacacatgattcccttcgtggtatcgggcggtattttgctggcggtttccgtcatgttgtatggcaaaggcgcagtgccggatgccgtagccgatccaaatctgaaaaaactgtttgatatcggcgttgcgggcttgacgctgatggtgcctttcctcgcagcgtacatcggttattccattgcagagcgttctgcgctggctccgtgcgctatcggtgcctgggttggtaacagctttggtgcgggcttctttggtgcactgatcgccgggattatcggcggcatcgtggtgcattacctgaagaaaattccggtgcataaagttctgcgctcggtgatgcctatcttcattattcctatcgtcggcacactgattaccgcaggcatcatgatgtggggcttgggcgagcctgtaggggcgttgaccaacagcctgactcagtggcttcaggggatgcagcagggcagcattgttatgctggcggtgatcatgggtctgatgctggcgttcgatatgggcggtccggttaacaaagtggcctatgccttcatgctgatttgcgttgctcagggtgtttataccgtggtggccatcgctgccgtgggtatttgtatcccgccgctggggatggggctggcgacgctgattggtcgtaaaaatttctccgcagaagagcgcgaaaccggcaaagcggcactggtgatgggctgtgttggcgttactgaaggggcgattcctttcgccgctgccgatccgctgcgtgtcattccttccatcatggtcggttcagtttgtggtgcagtaactgcggcgctggtcggtgcgcagtgctatgcaggctggggtggtctgattgtgctgccggtggttgaaggcaagctgggttatatcgcagcagtggctgtcggagcagtggtgacggctgtttgtgtgaacgtgctgaaaagtctggcgcgtaaaaatgggtcttcgactgatgaaaaagaagacgacctggatttggattttgaaattaattaattgaggaacgagccatgacgaaaattattgcagtaaccgcatgtccttcaggtgttgcccatacctatatggcagcagaggcgctggaaagtgccgcgaaagcgaaaggctgggaagtgaaagtagaaacccaggggtcaattggtctggaaaatgaactgactgcggaagatgtggcgagcgctgatatggtgattctgaccaaagatatcggcatcaagtttgaagagcgttttgctggcaagaccatcgtgcgcgtcaacatcagcgatgcagtaaaacgtgctgacgccattatgagcaaaattgaagctcacctggcgcaaaccgcttaagttcttctcccgctcgcaagggcgggttcgctttcccacaggagttcctcatgacgaatcgtatctctcgcctcaaaactgcactgtttgccaatacccgtgaaatctcgctggagcgggcgctgctttataccgccagccatcggcaaaccgaaggcgaaccggtgatattgcgccgggcgaaagcaacagcgtatatccttgaacatgttgaaatttcgattcgtgatgaagaactgattgccggtaaccgcaccgtaaaaccgcgcgccgggattatgtcgccggaaatggacccttactggctgctgaaagagctggatcaattcccgacgcgtccgcaggaccgctttgctatcagcgaagaagataaacgtatctaccgtgaagagttgttcccgtactgggaaaaacgttcgatgaaagatttcatcaacgggcagatgacagatgaagtaaaagccgcgaccaacacgcagattttcagcatcaaccagacggataaaggccaggggcacattattattgattacccacgcctgttgaatcacgggctgggtgagctggtggcacagatgcagcaacattgtcagcaacagccggagaatcacttttatcaggccgcgttgttactgctggaagcctcgcagaaacacattttgcgttacgccgaactggcggaaacgatggcggcaaactgcacagatgcccagcgtcgcgaagagctgctgactattgcagagatctcccgccataacgcgcaacataagccgcagacgttctggcaggcgtgccagttattctggtacatgaacatcattctgcaatacgaatccaacgccagttcgctatcgttggggcgcttcgaccagtatatgttgccgttctatcagacatcattaacccagggcgaagatgcggcgttcctgaaagaactgctcgaatctttatgggtgaaatgcaacgacatcgtgctgttgcgctccaccagtagcgcgcgttatttcgccggtttcccgaccggctataccgcactgctcggcgggttaaccgagaacggacgtagcgcggtgaacgtgctttcgttcctttgccttgacgcctatcaaagcgtgcaattaccgcaaccgaacctcggcgtgcgcactaacgccttgatcgacacgccgttcctgatgaaaaccgccgaaaccattcgcttcggtaccggtattccgcaaatctttaacgatgaagtggtggtgccagcgttcctcaaccgtggcgtttcgctggaagatgcgcgcgactattccgtagtgggctgtgtggaattatctattcccggcagaacctacggcttgcatgacatcgcgatgtttaatctgctgaaagtgatggaaatctgcctgcatgaaaatgaaggcaatgctgcgctgacttatgaaggtttactggagcagatccgcgccaagatcagccactacatcaccctgatggttgagggcagcaatatttgtgatatcggccatcgcgactgggcacctgtaccgctgctctcatcgtttatcagcgattgtctggaaaaaggccgcgatattaccgatggcggcgcgcgttataacttctccggcgtacaggggatcggtatcgccaacctgagcgattctctccatgcgttgaaagggatggtttttgagcaacagcgtttaagttttgacgaattgctgtcggtattaaaagccaacttcgcaacgccagaaggcgaaaaagtccgcgctcgcttaattaaccgcttcgagaaatacggtaacgatatcgacgaggtggataacatcagcgccgaactgttgcgccactactgcaaagaagtggaaaaataccagaacccgcgcggcggctacttcacgccgggatcgtataccgtttctgctcacgtcccgttgggatcggtggttggcgcgacgccagacggtcgttttgccggagaacagctggcagacggcggcttgtcacccatgctgggccaggacgcacaagggccaacagcggtactgaagtcagtcagtaagctcgataacacgctgctgtctaacggtacgttgctgaacgtgaaattcactccggcgaccctggaaggtgaagcaggattacgcaaactggccgacttcttacgggcgtttacccagcttaagttacaacatattcagtttaacgtggtgaacgccgacacgttgcgggaagcgcaacagcgcccacaagattatgccgggctggtggtgcgcgttgccggatacagcgccttctttgtcgaactgtcgaaggagatccaggatgacatcatccgccggacagcgcatcagctgtaacgttgtggaaacgcgccgcgatgatgtggcgcgcattttcaacattcagcgttattcactgaatgacggcgagggcattcgtacggtggtcttttttaaaggctgtccgcatctttgcccgtggtgtgctaatccggagtcgatctccggcaaaatccagacggtacgcagagaggcgaaatgtctgcactgtgcgaaatgtttgcgtgatgcggatgaatgcccctccggggcgtttgaacggattggtcgcgatatcagccttgacgctctggaacgggaagtgatgaaagatgacattttctttcgcacgtccggcggcggcgtcacgctttctggcggcgaagtgttaatgcaggcggagtttgctacccgttttttacagcgactgcggctgtggggtgtgtcatgcgccattgaaactgccggagacgcaccagccagcaagctattaccgctggcgaaattgtgcgatgaagtgttgttcgatttaaaaattatggacgcgactcaggcgcgggatgtggtgaagatgaacctgccacgcgtgctggagaatctgcgtttgctggtgagtgagggcgtcaacgtgatcccgcgtttaccgctgatccctggtttcacgctcagccgggagaatatgcagcaggcgctggatgtactgatcccgctgaatatcaggcagatccatctgttaccgtttcatcagtacggcgaaccgaaataccgcctgctggggaaaacatggtcgatgaaagaggtgcctgcgccgtcgtcagctgatgtggcaacgatgcgcgaaatggcagaacgggccggacttcaggttaccgtgggaggttaaaatggcatacctggtggcagtaaccgcctgcgtaagcggcgtggcgcatacttatatggcggcggaacggctggaaaagttgtgcctgttagagaagtggggagtcagcattgaaactcagggcgcgctgggaacggagaatcgtttagcggatgaggatatccgccgggcggatgttgctctgttgattacggatatcgagcttgccggtgccgagcgatttgaacattgccgctatgtgcaatgcagcatctacgcattcctgcgtgagccgcagcgggtaatgagcgcggtgcgcaaagtgctttctgcgccgcagcaaacccatcttattctggagtagtcggtttttctgtcagttggctgtggtactgccggcgatattccgacggcgagcgttcggtgtttttacgaaacagacggcagaagtagttgctgtcgacaaagccgcaggcgtgcgccacttcttttaccttcaggtcatagcctttcaataacgtcttagcgtgctccagtcgcgtgtgattcaggtattcgttaaaaccaatggcccccgttttttgaaacaggtgcgagaggtaatttggcgaaatataaaacgcctgtgcaacagattcgcgggtaagcgcggaggcatagcgttcgtcgatataatcgcgaatagcttcaaatagtgcctggctgcgtgaggcggtctggatttggctgccaagcaaatcgcggcagtggctaagcaggctggcgacgataagccttgccgtttgctgctcctgcggctgcatttgcatttcattgagcgtttgtagcagaaaagaacctatgcgtgggccgcgtcgggcgacgtgttgcttcgccagattttgatattgtttgccatcccattgcacgacgctgaagccgagttgctgtttgccaaacagcacgctaaaggtagtagcgggggcttgccattgtggaaaattccagccaccagcaggaacgtacagcacatcgccgggaactaacgttgctccagcgccggtatcaacaaactcaccttccagcacaatttccagccgtggaaaatcgacctgatacgcaagatcgggcaccgggccgttactgctggcaaagtaaatctggcgcagggacagcgggccgttgatcaggcgggagagcagatagctgacgtcgtgatacatgttattcccttaggtatgtagacgggaaaacagtaactggcattattaaaaaaggccacctgaaaagtgtggcctgaggggagttcgatgtaaacattgcggcagttgtattgccggatgtggcgtaaacgccttatccagcctaccgccgcgatctgtaggccggataagacgcgtcaagcgtcgcatccggcaaatagcgcctggctgataattactgattacccacctgatcgccatagggcagtgtgtcgtaatcgatcagtgcgtttttcttatacgggttaccaatccagcgggtagtttctttgaactgcggattcaccactgaacgggttggatcgtaaccgtcgtaagataagcccgccaaatctgaccaggtgtggatcagttccgccaggctgtatttacgatcaacatcctgcgagaaatcacggggatgagtcgcttgccatttttctgacgtccacagcaggaacggaatggtgtacatatgacgcgtcgggttgtcctcattacgcccctgagttttgtgcggcggcgtgtcgtaaacctcttcaccgtggtcagagaaataaaccaggaaaccgttcgggtttgctgctttaaagtctttaatcaggctggcaaccacatgatcgttatacaggttagcgttgtcataatcgttatatgactccagctcttccgcgtttaatcccggcggaacatgatcggtattgccatcaaacttgccctgattttccgggtagcggtatttgtatttgatatgcgtacccagcagatgaacaatgatcagtttcttcggcgcagggtcattcagcacttcctggaacggcttcagcacgttggtgtcgtattcacgcgcactctgcgtacgttgctggttcatgtagtactgcttgtcggtctggcgcgaaaataccgtcagcatggtattgcgggcggtcatcgtctgctggttggtgatccagaaggttttataacccgcctgtttcatcatgttcatcagcgacggctgcgtcagatacagatccgggttcttttcattggcaaaggtcagcgcctgttgcaggatttcaatggtgtacggacgagacgtaactacgttattaaacacggtcagattcggatcggttttatgcagcgcatccagctccggcgtggtttcacgcggataaccgtacagactcatgcgtccgcgctgggtcgactcgccaatcaccagcactaaagtgcgcggttcgttacccgattcatctttgaaattagccagtggcggcaaggcattattttcattcagtaactttgttagcgagtttagttgctgacgatactgataatagccggtcaggaattgccacggtgcggcaggctccatacgcgaggccaggttatccaacgttttctcaaacggcttgtttttgataaacgtattcatggcgatcggatgcagaatcaagccataaagcagggcaaaagagacaacataacgccacggctttggaatatagaccgggcgcaggcgtgtccacagcagaactgccaccgccgtataggccagcgcgataagcacaattttcaggctgaaatactggcttaaatactcgctggcttcgttggtgttggtttcgaacatcacaaacagaacgctctgcgagaactcctgaccgtagatgacgtagtagcacagcgccgccagagaggccgcccatagcaccacgccgattactgcggcaataattttaatccgcttcggaaagaggaataccgggatcaaccacagcgaactgaataacagcgagtcgcgaatgccgttagtgccactataaccactgatgtaaataatggcctgtagcagagtagagaaaaaccaaaagtagagcagtgcccaacccagggctttccagctaaaaagaggtttagcctggacttctgtggaatgcatagtaagaacctgtcttgaaaaaatatcgccgaatgtaacgacaattccttaaggatatctgaaggtatattcagaatttgaataaaatgcagacagaaatatattgaaaacgagggtgttagaacagaagtatttcagaaaaccctcgcgcaaaagcacgagggtttgcagaagaggaagattagccggtattacgcatacctgccgcaatcccggcaatagtgaccattaacgcttgttcgacgcgaggatccggttcctggccttctttttctgcctggcgggagcggtgcagcaactcggcctgcaatacgttcagcgggtcggtgtaaatattccgtagctgaatagactctgcaatccacggcagatcggccatcagatgggaatcgttggcaatcgccagcaccactttgatgtcttcttcttgcaggttgcgtaactctttacctaacggccacagtgctttgtctaccaggcgttggtcatagtattccgccagccacaggtctgctttggcgaagaccatctccagcatgccgagacgcgtcgagaagaatggccaatcgcggcacatagcctccagctcgctctgtttgccgtcttcgaccactttttgcagcgccgtacctgcacccagccaggcggggagcatcagacggttttgcgtccaggcgaagatccacggaatggcgcgtagtgactcgacgccgccggttgggcgacgtttcgccggacgtgaacccaacggcagtttgcccagttcttgttccggcgtagcggagcggaagtaaggcacaaaatctttgttttcacgtacgtagccgcggtagacatcgcaggagatgactgacagttcatccataatgcgacgccagctctctttcggctccggcggtggcagcaggttggcttccagaatcgccccggtataaagcgacaggctgctgacggtgatttctggcagaccatatttaaagcggatcatctcgccctgttcggttacgcgcaggccgcctttcaggcttcctggcggttgtgacagcagcgccgcatgagcaggtgcgccgccgcgaccaatggaaccgccgcgaccgtggaacaacgtcagctcaatacccgctttttcgcaggttttgattaatgcatcctgtgcctgatattgcgcccaggaagctgccatcactcccgcatcttttgctgagtcggaatagccaatcatcaccatctgtttgccctgaatcaggccacgataccagtcaatattgagcagctgggtcatgacatcgttggcgttgttcagatcatcgagggtttcaaacagcggagcaaccggcatcgcaaacccgatacccgcttctttcagcagcaggtggacagccagtacgtcggacggcgttttcgccatcgagatcacgtaggcggcaatggagccttgcggtgcttcggcaatcacctggcaggtatcgagcacttcgcgcgtttcggcgcttggttgccagttgcgcggcagaagcggacgtttggagttcagttcgcggatcaggaacgcctgtttgtcggcctctgaccagctttcgtagtcgccgataccgaggtagcgggtcagctcgcccagcgcttcggtatgacgcgtgctctcctgacggatatcaatacggaccagcggtacgccgaaacatttcacgcggcgcagggtgtcgagcagatcgccgttggcgataatacccatgccacacgcctgaagtgactggtagcaagcgtagagcggttcccacagttcttcgttttgtgtcagcaggccttctggttttggcagttcttcgcctttcaggcgcgcttccagccatgcctgtgtcgccatcaggcgagaacgcaggtttttcatcagatagcgatacggttctgcggcaccttcttcgccaaccagcgccagcagttcaggggtcgcttcaaccatcgacagttcagaaaccagcacctgaatatctttcaggaacaaatcggtggctttccagcggctgagtagcaggacgtggcgggtgatatcggcagtgacgttcgggttgccgtcgcggtcgccgcccatccacgaagtaaaacggaccggaacaaattcgacgggcagtttgtagccgaggttctcttccagttgttcgttcagttcgcgcaggtaatttggtacgccttgccacaggctgttttccactacggcaaagccccatttggcttcatctaccgggcttggacgcagcttacggatttcatcggtatgccatgactgggcgatcaactggcgcaggcgacgcatcagctggttgtgttcgtagtcagcgatatctttgttatcgagctgttttaaacaggcgttcacttccaccattttgtggatcagtgtacgacgggtaatttcggttgggtgagccgtgaggaccagttccagcgacagcgattccactgcttttttgatggtgtcttcgctcagttccggctggtttttcagtttacgcagggtgcgggcgatcacttccgggttgctggcagcttcgcctttcggcgaaatgctgtggtattgctcggcggtgttggccaggttcaggaactgactaaacgcacgcgcaacgggcagcagctcgtcgttcgacaaattttgtaaggtggtgagcaactcctggcggttagcatcattgccagcgcgtgaagatttcgacaacttacggatagtttctacgcgttcaagaatgtgttctcccaacgcatccttgatggtttctcccagcactttgccgagcatactgacattactacgcaatgcggaatattgttcgttcatattaccccagacaccccatcttatcgtttgatagccctgtatccttcacgtcgcattggcgcgaatatgctcgggctttgcttttcgtcgtcttttataaagccacgtaaaagcggtgacgtcaaatgctgcgaaatcgcttcagcaaacgaataaatagcaggaatttacgtcattaaattcacgacgctttaaataagcgtaacttatggaaatgttaaaaaatcgccccaagtaacaccaaaggtgtaggtcggataagatgcgcaagtatcgcatccgacattattgcggcactggagtttggcaacagtgccggatgcggcgcgagcgccttatccggcctacagttgggcatcgtttgagtcactgtcggtcggataagatgcgcaagtatcgcatccgacattattgcggcactggagtttggcaacagtgccggatgcggcgcgagcgccttatccggcctacggttgggcatcgtttgagtcactgtaggtcggataagatgcgcaagcatcgcatccgacattattgcggcactggagtttggcaacagcgccggatgcggcgcgagcgccttatccggcctacgttttaatgccagcaaaaatggtgaattacctgggttatcagttcgcgggtgggcttgataaaccgtgtttccagatattcatcaggttgatgagcctgattaattgagccaggccccaacaccagcgtcgggcataacgtttgaataaacggcgcttcggtacagtagttcaccacttcggtttttgctccgagcaatttctcaaccacttcaaccagttgatgattcggtgggcattcatagccagggatcggcggatgcagctcgtcgaccgtcagacgacccggccagcgttcgctcaccggagccaatgcatcgttgagcaaaccattaagttcattgagtgtcatgccaggcagcggacgaatatccatatgcaactcacagcaagcgcaaatacggttagaagcgtcgccaccgtgaatatgcccgaggttgagcgtagggtatggcacggtaaacgcttcgtagtgataacgttctttcaggttatcgcgcaattgcaaaatatgcccgatggcgtcgtgcattagttcgatagcgttaactccgcgtgctggatcgctggagtgccccgactggccctgaatacggatggcgttagagatatgacctttatgtgcgcgtaccggttgtagtgacgtcggttcgccaatgatggcgcaatccgggcgcagggcggtagtttcggcaaaataacgcgctccggccatactggtttcttcatcagcagtcgccagaatgtagagcggttttttcagtttcgtgacgtcgacatcgcgtagcgcatcaaggataaacgcaaaaaagcctttcatgtcggcggtgcctaagccgtaaagcttgccgtcatgctccgtcagtgtaaacggatcgcgcgtccagcgaccgtcatcaaatggcaccgtatcggtatgccccgccagcaacaagccgccagccccctgtccgatacttgccagcatattgaatttgttgcgagttcctggaacaggctgcacttccacattgaagcccaaatctttaaaccagtccgccagcagagtgattaaatctgcattgctttgatcgagtgcctcttccgtggcgcttattgaaggtgtggcaatcagagcgcggtaaatctcgataaatggcggtaatttgtttttcattgttgacacacctctggtcatgatagtatcaatattcatgcagtatttatgaataaaaatacactaacgttgagcgtaataaaacccaccagccgtaaggtgaatgttttacgtttaacctggcaaccagacataagaaggtgaatagccccgatgttgaatacgctgattgtgggtgccagcggctacgctggcgcagagctagtgacctatgtaaatcgccatccgcatatgaacataaccgctttgactgtttcagcgcaaagcaatgatgcgggaaagttaatctccgatttgcatccgcagctaaaaggcatcgttgatctgccgttgcagccgatgtcggatatcagcgagtttagcccaggggtggacgtagtgtttctcgccaccgcccatgaagttagccacgatttagcgccgcagtttcttgaagcgggctgcgtggtgttcgacctttccggcgcgtttcgtgttaacgacgccaccttctatgaaaaatattacggctttacccatcaatacccggaactgttggaacaggcagcctacggtctggcggagtggtgcggtaataaattaaaagaagcgaatttgattgcggtgccgggctgttatccgacggcggcacagctggcgctgaaaccgttgattgatgccgatcttcttgacctcaatcagtggccggtgatcaacgccaccagcggcgtgagcggtgcagggcgtaaagcggccatttcaaacagcttttgtgaagttagcctgcaaccgtatggcgtctttactcatcgccatcaaccagagatcgccacacacctcggtgctgacgttatcttcaccccacatctgggcaatttcccgcgcggcattctcgaaaccattacctgccgcctgaaatcgggtgtgacccaggcgcaagtcgcgcaagtgttacagcaggcgtatgcccataaaccgctggtgcggctgtatgacaaaggcgttccggcgctgaaaaatgtcgttgggctgccattttgcgatatcgggtttgccgttcagggcgagcatctgattattgtggcgaccgaagacaacttactgaaaggcgcggcggcacaagcggtacagtgcgccaatattcgtttcggctatgcggaaacgcagtctcttatttaagggtgcaatgatgaatccattaattatcaaactgggcggcgtactgctggatagtgaagaggcgctggaacgtctgtttagcgcactggtgaattatcgtgagtcacatcagcgtccgctggtgattgtgcacggcggcggttgcgtggtggatgagctgatgaaagggctgaatctgccggtgaaaaagaaaaacggcctgcgggtgacgcctgctgatcagatagacattatcaccggagcactggcgggaacggcaaataaaaccctgttggcatgggcgaagaaacatcagattgcggccgtaggtttgtttctcggtgacggcgacagcgtcaaagtgacccagcttgatgaagagttaggtcatgttggactggcgcagccaggttcgcctaagcttatcaactccttgctggagaacggttatctgccggtggtcagctccattggcgtaacagacgaagggcaactgatgaacgtcaatgccgaccaggcggcaacggcgctggcggcaacgctgggcgcggatctgattttgctctccgacgtcagcggcattctcgacggcaaagggcaacgcattgccgaaatgaccgccgcgaaagcagaacaactgattgagcagggcattattactgacggcatgatagtgaaagtgaacgcggcgctggatgcggcccgcacgctgggccgtccggtagatatcgcctcctggcgtcatgcggagcagcttccggcactgtttaacggtatgccgatgggtacgcggattttagcttaagttttgttggccggaggcgcagctttccggcattgaatttcaaaataaggaaacagagttatggcactttggggcgggcgttttacccaggcagcagatcaacggttcaaacaattcaacgactcactgcgctttgattaccgtctggcggagcaggatattgttggctctgtggcctggtccaaagccctggtcacggtaggcgtgttaaccgcagaagagcaggcgcaactggaagaggcgctgaacgtgttgctggaagatgttcgcgccaggccacaacaaatccttgaaagcgacgccgaagatatccatagctgggtggaaggcaaactgatcgacaaagtgggccagttaggcaaaaagctgcataccgggcgtagccgtaatgatcaggtagcgactgacctgaaactgtggtgcaaagataccgttagcgagttactgacggctaaccggcagctgcaatcggcgctggtggaaaccgcacaaaacaatcaggacgcggtaatgccaggttacactcacctgcaacgcgcccagccggtgacgttcgcgcactggtgcctggcctatgttgagatgctggcgcgtgatgaaagccgtttgcaggatgcgcttaagcgtctggatgtcagcccgctaggctgtggcgcgctggcgggaacggcctatgaaatcgaccgtgaacagttagcaggctggctgggctttgcttcggcgacccgtaacagtctcgacagcgtttctgaccgtgaccatgtgttggaactgctttctgctgccgctatcggcatggtgcatctgtcgcgttttgctgaagatctgattttctttaacaccggcgaagcggggtttgtggagctttctgaccgcgtgacttccggttcatcattaatgccgcagaagaaaaacccggatgcgctggagctgattcgcggtaaatgcggccgggtgcagggggcgttaaccggcatgatgatgacgctgaaaggtttgccgctggcttacaacaaagatatgcaggaagacaaagaaggtctgttcgacgcgctcgatacctggctggactgcctgcatatggcggcgctggtgctggacggcattcaggtgaaacgtccacgttgccaggaagcggctcagcagggttacgccaacgccaccgaactggcggattatctggtggcgaaaggcgtaccgttccgcgaggcgcaccatattgttggtgaagcggtggtggaagccattcgtcagggcaaaccgctggaagatctgccgctcagtgagttgcagaaattcagtcaggtgattgacgaagatgtctatccgattctgtcgctgcaatcgtgcctcgacaagcgtgcggcaaaaggcggcgtctcaccgcagcaggtggcgcaggcgattgcttttgcgcaggctcggttagggtaagaacatttatatgtataaatttgagcctggcttatcgccgggcttttttatggcaaaaaaaagcggatcctggagatccgcaaaagttcacgttggctttagttattcgagttgagaaactctcgaaacgggcagtgacttcaagggttaaaagaggtgccgctccgtttctgtgagcaattatcagtcagaatgcttgatagggataatcgttcattgctattctacctatcgccatgaactatcgtggcgatggaggatggataatgaatattcgtgatcttgagtacctggtggcattggctgaacaccgccattttcggcgtgcggcagattcctgccacgttagccagccgacgcttagcgggcaaattcgtaagctggaagatgagctgggcgtgatgttgctggagcggaccagccgtaaagtgttgttcacccaggcgggaatgctgctggtggatcaggcgcgtaccgtgctgcgtgaggtgaaagtccttaaagagatggcaagccagcagggcgagacgatgtccggaccgctgcacattggtttgattcccacagttggaccgtacctgctaccgcatattatccctatgctgcaccagacctttccaaagctggaaatgtatctgcatgaagcacagacccaccagttactggcgcaactggacagcggcaaactcgattgcgtgatcctcgcgctggtgaaagagagcgaagcattcattgaagtgccgttgtttgatgagccaatgttgctggctatctatgaagatcacccgtgggcgaaccgcgaatgcgtaccgatggccgatctggcaggggaaaaactgctgatgctggaagatggtcactgtttgcgcgatcaggcaatgggtttctgttttgaagccggggcggatgaagatacacacttccgcgcgaccagcctggaaactctgcgcaacatggtggcggcaggtagcgggatcactttactgccagcgctggctgtgccgccggagcgcaaacgcgatggggttgtttatctgccgtgcattaagccggaaccacgccgcactattggcctggtttatcgtcctggctcaccgctgcgcagccgctatgagcagctggcagaggccatccgcgcaagaatggatggccatttcgataaagttttaaaacaggcggtttaaaccgtttaacgcagctacccgataggcttccgccatcgtcgggtagttaaaggtggtgttgacgaagtactcaatagtgttgccgccacctttctgttccataatcgcctgaccgatatgaataatttcggcagcgcgctcgccaaagcagtgaatacccagaatctcttttgtttcccgatggaacaaaattttcagcgtgcccacgttcatgccgacgatttgtgcgcgtgccagatgtttaaactgggcgcggcccacttcatatggcactttcattgcggtcagctgctgttcggttttgcccacagagctgatttccgggatggtgtaaataccggtagggatatcttcaatcagatgtgcggtggcttcgccttttaccagcgcctgcgcggcaatgcgcccctggtcataggccgccgacgccaggctcggataaccaatcacgtcgcccaccgcgtaaacgtgtggctgtgcggtctgatacatgctgttgaccttcagctgtccgcggctgtcagtttctagcccaatgttctgtaacgccagcgaatcggtattaccggtgcgaccgttggcatagagcaggcagtcagctttcagttttttacccgacttcagatgcatgatcacaccatcgtcacagccttcgatcttctcgtactcttcgttgtgacgaatcactacgccactgttccagaagtgataggagagagaatctgacatctcttgatcgagaaatgccagcaggcgatcgcgggtgttgatcagatccacttttacatccataccgcggaagatcgacgcatattcacagccgatcactccagcaccatagataagtacatggcgcggttcgtggtgcatgctgagaattgagtcgctgtcgtaaatgcgtggatgggtgaaatcaacatctgttggatgatatggacgagagccgcaggcaataacaaatttttcagcggttagtgtttcaacgctgccgtccgggcaatccagcgccaacgtatgctcgtcaacaaagcgagcgtttccctgcaatatttcacagtgattacgttcgtaaaatccctgacgcatgcgcgtttgttgattaatcacgttatcggcatggttaaggatatcggcaaaagaagagcggagcagtcgggaatggtcgctgtaaagtgggttttgattgaattctataatgcggctgacggcgtgacggagagctttcgacgggatggtgccccagtgggtgcaaccgccgccaacattttgataacgctcgataactgcgacgcgcgcaccttgcttaaccaggcccattgcagcgccttcgccgccggggccggaacctattactatggcatcgtaatcgtaggaatgtggcatggtagggcttacctgttcttatacataaaagcaacagaatggtaacattttatcgcgggtaagccaattgatccccgtcatttatctggctatatcctgagcggcctttgctttgtctgtttcttacttttgccctgacgttttattggatttttatcgacgatactctccgtttaagcggcaggtttccgctgtacgtaaaagaaccggccaaagaattgcagtaaatatgttttattgcgttaccgttcattcacaatactggagcaatccagtatgttcattctctggtatagtgccagcagtacttttggcaaggattcagacatcgtgatgggcgtaagagcgcaacaaaaagaaaaaacccgccgttcgctggtggaagccgcatttagccaattaagtgctgaacgcagcttcgccagcctgagtttgcgtgaagtggcgcgtgaagcgggcattgctcccacctctttttatcggcatttccgcgacgtagacgaactgggtctgaccatggttgatgagagcggtttaatgctacgccaactcatgcgccaggcgcgtcagcgtatcgccaaaggcgggagtgtgatccgcacctcggtctccacatttatggagttcatcggtaataatcctaacgccttccggttattattgcgggaacgctccggcacctccgctgcgtttcgtgccgccgttgcgcgtgaaattcagcacttcattgcggaacttgcggactatctggaactcgaaaaccatatgccgcgtgcgtttactgaagcgcaagccgaagcaatggtgacaattgtcttcagtgcgggtgccgaggcgttggacgtcggcgtcgaacaacgtcggcaattagaagagcgactggtactgcaactgcgaatgatttcgaaaggggcttattactggtatcgccgtgaacaagagaaaaccgcaattattccgggaaatgtgaaggacgagtaatgaaacaagcaaatcaagatagaggtacgctgctgctggcgttagttgctggcttatcgattaatggtactttcgcagcgctgtttagctccattgtgccattttctgtattcccgattatttccctggtgctgacggtttactgcctgcatcaacgttatcttaatcgcactatgccggtaggcttgccgggtctggcagctgcctgttttattctcggcgtactgctgtacagcacggtagttcgtgcggaatatccggatatcggctctaacttcttcccggcagtactctccgtcattatggtgttctggattggcgcgaagatgcgtaaccgtaagcaggaagttgctgagtaatcggtattatgccggatgctggcgcatccggcatgggttttacttcgcggtcagtaatacgccgcactccatatggtgcgtgtaggggaactgatcaaacagagccagacgttcgaccttgtgcgtctggcttaatgtttccagattcttgcataacgtttccgggttacaggagatgtacaaaatacgcggatacgcctgcaccattttctcggtttcactgtccagaccgctgcgcggagggtcgacaaaaatggtttcgcactgataactctttaagtcgatcccttgcaggcggttaaactcgcgcacaccattcatcgcctgagtaaattcttctgccgccatacgaataatttgtacgttatcaatatggttagctgcgatgttgtattgcgcagcagcaaccgacggcttagcgatttcggtggctaatacccgatcaaaattacgcgccagcgctaatgaaaagttaccgttgccgcagtacagctccagtaaatcgccttttgagcctttggttacgtccagcgcccattccagcatctgaatattcatcgccgcgttcggctgggtaaagctgttttctacctgacggtagatcatctctttccctgcgaccggcagacgttcatcgatgtaatcctgatccagctcgattttggttttcgttgcccgaccaatcagatgcacattcagattctgcgcgcgcagtgcatcgcgcagggcctccgcttcctgacgccactcatcatccagcttcttatggtatagcagggaaaccaccgcctgattactcagtgtagtgaggtaatcaatctggaacaacttgtggcgcagaacgggattattacgcacacccgcaatcatcgccgtcatcaactggttgataagttcactggcggcggggaagctatccacgcggatgcggcttttggtttgttgatcgaaaatgatgtgatacaggtcatcgccatcgtgccagatgcggaactccgcgcgcatccggtaatgactgaccggcgagcgaaacacttccggaaccaggtcagaaaacggtgccatcatactttgcaaacgtaccactttttcggctaactgcgcttcatactgttctgttggaaggtgttcgggggtcatgatgtatcctgaaaaattaaagtacgcggcgattgtagggattgctcatcagatgtccagatcttgatgaattcctatttgtgagctacgtctggacagtaacttgttacaacctgtagcatccacttgccggtcctgtgagttaatagggaatccagtgcgaatctggagctgacgcgcagcggtaaggaaaggtgcgatgattgcgttatgcggacactgccattcggtgggaagtcatcatctcttagtatcttagatacccctccaagcccgaagacctgccggccaacgtcgcatctggttctcatcatcgcgtaatattgatgaaacctgcggcatccttcttctattgtggatgctttacaatgattaaaaaagcttcgctgctgacggcgtgttccgtcacggcattttccgcttgggcacaggataccagcccggatactctcgtcgttactgctaaccgttttgaacagccgcgcagcactgtgcttgcaccaaccaccgttgtgacccgtcaggatatcgaccgctggcagtcgacctcggtcaatgatgtgctgcgccgtcttccgggcgtcgatatcacccaaaacggcggttcaggtcagctctcatctatttttattcgcggtacaaatgccagtcatgtgttggtgttaattgatggcgtacgcctgaatctggcgggggtgagtggttctgccgaccttagccagttccctattgcgcttgtccagcgtgttgaatatatccgtgggccgcgctccgctgtttatggttccgatgcaataggcggggtggtgaatatcatcacgacgcgcgatgaacccggaacggaaatttcagcagggtggggaagcaatagttatcagaactatgatgtctctacgcagcaacaactgggggataagacacgggtaacgctgttgggcgattatgcccatactcatggttatgatgttgttgcctatggtaataccggaacgcaagcgcagacagataacgatggttttttaagtaaaacgctttatggcgcgctggagcataactttactgatgcctggagcggctttgtgcgcggctatggctatgataaccgtaccaattatgacgcgtattattctcccggttcaccgttgctcgatacccgtaaactctatagccaaagttgggacgccgggctgcgctataacggcgaactgattaaatcacaactcattaccagctatagccatagcaaagattacaactacgatccccattatggtcgttatgattcgtcggcgacgctcgatgagatgaagcaatacaccgtccagtgggcaaacaatgtcatcgttggtcacggtagtattggtgcgggtgtcgactggcagaaacagactacgacgccgggtacaggttatgttgaggatggatatgatcaacgtaataccggcatctatctgaccgggctgcaacaagtcggcgattttacctttgaaggcgcagcacgcagtgacgataactcacagtttggtcgtcatggaacctggcaaaccagcgccggttgggaattcatcgaaggttatcgcttcattgcttcctacgggacatcttataaggcaccaaatctggggcaactgtatggcttctacggaaatccgaatctggacccggagaaaagcaaacagtgggaaggcgcgtttgaaggcttaaccgctggggtgaactggcgtatttccggatatcgtaacgatgtcagtgacttgatcgattatgatgatcacaccctgaaatattacaacgaagggaaagcgcggattaagggcgtcgaggcgaccgccaattttgataccggaccactgacgcatactgtgagttatgattatgtcgatgcgcgcaatgcgattaccgacacgccgttgttacgccgtgctaaacagcaggtgaaataccagctcgactggcagttgtatgacttcgactggggtattacttatcagtatttaggcactcgctatgataaggattactcatcttatccttatcaaaccgttaaaatgggcggtgtgagcttgtgggatcttgcggttgcgtatccggtcacctctcacctgacagttcgtggtaaaatagccaacctgttcgacaaagattatgagacagtctatggctaccaaactgcaggacgggaatacaccttgtctggcagctacaccttctgaaccacgtcccaccgtgctggtgtttgactccggcgtcggtgggttgtcggtctatgacgagatccggcatctcttaccggatctccattacatttatgctttcgataacgtcgctttcccgtatggcgaaaaaagcgaagcgtttattgttgagcgagtggtggcaattgtcaccgcggtgcaagaacgttatccccttgcgctggctgtggtcgcttgcaacactgccagtaccgtttcacttcctgcattacgcgaaaagttcgacttcccggttgttggtgtcgtgccggcgattaaacctgctgcacgtctgacggcaaatggcattgtcggattactggcaacccgcggaacagttaaacgttcttatactcatgagctgatcgcgcgtttcgctaatgaatgccagatagaaatgctgggctcggcagagatggttgagttggctgaagcgaagctacatggcgaagatgtttctctggatgcactaaaacgtatcctacgcccgtggttaagaatgaaagagccgccagataccgttgtattgggttgcacccatttccctctactacaagaagaactgttacaagtgctgccagagggaacccggctggtggattctggcgcagcgattgctcgccgaacggcctggttgttagaacatgaagccccggatgcaaaatctgccgatgcgaatattgccttttgtatggcaatgacgccaggagctgaacaattattgcccgttttacagcgttacggcttcgaaacgctcgaaaaactggcagttttaggctgatttggttgaatgttgcgcggtcagaaaattattttaaatttcctcttgtcaggccggaataactccctataatgcgccaccactgacacggaacaacggcaaacacgccgccgggtcagcggggttctcctgagaactccggcagagaaagcaaaaataaatgcttgactctgtagcgggaaggcgtattatgcacaccccgcgccgctgagaaaaagcgaagcggcactgctctttaacaatttatcagacaatctgtgtgggcactcgaagatacggattcttaacgtcgcaagacgaaaaatgaataccaagtctcaagagtgaacacgtaattcattacgaagtttaattctttgagcgtcaaacttttaaattgaagagtttgatcatggctcagattgaacgctggcggcaggcctaacacatgcaagtcgaacggtaacaggaagaagcttgcttctttgctgacgagtggcggacgggtgagtaatgtctgggaaactgcctgatggagggggataactactggaaacggtagctaataccgcataacgtcgcaaaaccaaagagggggaccttcgggcctcttgccatcggatgtgcccagatgggattagctagtaggtggggtaacggctcacctaggcgacgatccctagctggtctgagaggatgaccagccacactggaactgagacacggtccagactcctacgggaggcagcagtggggaatattgcacaatgggcgcaagcctgatgcagccatgccgcgtgtatgaagaaggccttcgggttgtaaagtactttcagcggggaggaagggagtaaagttaatacctttgctcattgacgttacccgcagaagaagcaccggctaactccgtgccagcagccgcggtaatacggagggtgcaagcgttaatcggaattactgggcgtaaagcgcacgcaggcggtttgttaagtcagatgtgaaatccccgggctcaacctgggaactgcatctgatactggcaagcttgagtctcgtagaggggggtagaattccaggtgtagcggtgaaatgcgtagagatctggaggaataccggtggcgaaggcggccccctggacgaagactgacgctcaggtgcgaaagcgtggggagcaaacaggattagataccctggtagtccacgccgtaaacgatgtcgacttggaggttgtgcccttgaggcgtggcttccggagctaacgcgttaagtcgaccgcctggggagtacggccgcaaggttaaaactcaaatgaattgacgggggcccgcacaagcggtggagcatgtggtttaattcgatgcaacgcgaagaaccttacctggtcttgacatccacggaagttttcagagatgagaatgtgccttcgggaaccgtgagacaggtgctgcatggctgtcgtcagctcgtgttgtgaaatgttgggttaagtcccgcaacgagcgcaacccttatcctttgttgccagcggtccggccgggaactcaaaggagactgccagtgataaactggaggaaggtggggatgacgtcaagtcatcatggcccttacgaccagggctacacacgtgctacaatggcgcatacaaagagaagcgacctcgcgagagcaagcggacctcataaagtgcgtcgtagtccggattggagtctgcaactcgactccatgaagtcggaatcgctagtaatcgtggatcagaatgccacggtgaatacgttcccgggccttgtacacaccgcccgtcacaccatgggagtgggttgcaaaagaagtaggtagcttaaccttcgggagggcgcttaccactttgtgattcatgactggggtgaagtcgtaacaaggtaaccgtaggggaacctgcggttggatcacctccttaccttaaagaagcgtactttgtagtgctcacacagattgtctgatagaaagtgaaaagcaaggcgtttacgcgttgggagtgaggctgaagagaataaggccgttcgctttctattaatgaaagctcaccctacacgaaaatatcacgcaacgcgtgataagcaattttcgtgtccccttcgtctagaggcccaggacaccgccctttcacggcggtaacaggggttcgaatcccctaggggacgccacttgctggtttgtgagtgaaagtcgccgaccttaatatctcaaaactcatcttcgggtgatgtttgagatatttgctctttaaaaatctggatcaagctgaaaattgaaacactgaacaacgagagttgttcgtgagtctctcaaattttcgcaacacgatgatgaatcgaaagaaacatcttcgggttgtgaggttaagcgactaagcgtacacggtggatgccctggcagtcagaggcgatgaaggacgtgctaatctgcgataagcgtcggtaaggtgatatgaaccgttataaccggcgatttccgaatggggaaacccagtgtgtttcgacacactatcattaactgaatccataggttaatgaggcgaaccgggggaactgaaacatctaagtaccccgaggaaaagaaatcaaccgagattcccccagtagcggcgagcgaacggggagcagcccagagcctgaatcagtgtgtgtgttagtggaagcgtctggaaaggcgcgcgatacagggtgacagccccgtacacaaaaatgcacatgctgtgagctcgatgagtagggcgggacacgtggtatcctgtctgaatatggggggaccatcctccaaggctaaatactcctgactgaccgatagtgaaccagtaccgtgagggaaaggcgaaaagaaccccggcgaggggagtgaaaaagaacctgaaaccgtgtacgtacaagcagtgggagcacgcttaggcgtgtgactgcgtaccttttgtataatgggtcagcgacttatattctgtagcaaggttaaccgaataggggagccgaagggaaaccgagtcttaactgggcgttaagttgcagggtatagacccgaaacccggtgatctagccatgggcaggttgaaggttgggtaacactaactggaggaccgaaccgactaatgttgaaaaattagcggatgacttgtggctgggggtgaaaggccaatcaaaccgggagatagctggttctccccgaaagctatttaggtagcgcctcgtgaattcatctccgggggtagagcactgtttcggcaagggggtcatcccgacttaccaacccgatgcaaactgcgaataccggagaatgttatcacgggagacacacggcgggtgctaacgtccgtcgtgaagagggaaacaacccagaccgccagctaaggtcccaaagtcatggttaagtgggaaacgatgtgggaaggcccagacagccaggatgttggcttagaagcagccatcatttaaagaaagcgtaatagctcactggtcgagtcggcctgcgcggaagatgtaacggggctaaaccatgcaccgaagctgcggcagcgacgcttatgcgttgttgggtaggggagcgttctgtaagcctgcgaaggtgtgctgtgaggcatgctggaggtatcagaagtgcgaatgctgacataagtaacgataaagcgggtgaaaagcccgctcgccggaagaccaagggttcctgtccaacgttaatcggggcagggtgagtcgacccctaaggcgaggccgaaaggcgtagtcgatgggaaacaggttaatattcctgtacttggtgttactgcgaaggggggacggagaaggctatgttggccgggcgacggttgtcccggtttaagcgtgtaggctggttttccaggcaaatccggaaaatcaaggctgaggcgtgatgacgaggcactacggtgctgaagcaacaaatgccctgcttccaggaaaagcctctaagcatcaggtaacatcaaatcgtaccccaaaccgacacaggtggtcaggtagagaataccaaggcgcttgagagaactcgggtgaaggaactaggcaaaatggtgccgtaacttcgggagaaggcacgctgatatgtaggtgaggtccctcgcggatggagctgaaatcagtcgaagataccagctggctgcaactgtttattaaaaacacagcactgtgcaaacacgaaagtggacgtatacggtgtgacgcctgcccggtgccggaaggttaattgatggggttagcgcaagcgaagctcttgatcgaagccccggtaaacggcggccgtaactataacggtcctaaggtagcgaaattccttgtcgggtaagttccgacctgcacgaatggcgtaatgatggccaggctgtctccacccgagactcagtgaaattgaactcgctgtgaagatgcagtgtacccgcggcaagacggaaagaccccgtgaacctttactatagcttgacactgaacattgagccttgatgtgtaggataggtgggaggctttgaagtgtggacgccagtctgcatggagccgaccttgaaataccaccctttaatgtttgatgttctaacgttgacccgtaatccgggttgcggacagtgtctggtgggtagtttgactggggcggtctcctcctaaagagtaacggaggagcacgaaggttggctaatcctggtcggacatcaggaggttagtgcaatggcataagccagcttgactgcgagcgtgacggcgcgagcaggtgcgaaagcaggtcatagtgatccggtggttctgaatggaagggccatcgctcaacggataaaaggtactccggggataacaggctgataccgcccaagagttcatatcgacggcggtgtttggcacctcgatgtcggctcatcacatcctggggctgaagtaggtcccaagggtatggctgttcgccatttaaagtggtacgcgagctgggtttagaacgtcgtgagacagttcggtccctatctgccgtgggcgctggagaactgaggggggctgctcctagtacgagaggaccggagtggacgcatcactggtgttcgggttgtcatgccaatggcactgcccggtagctaaatgcggaagagataagtgctgaaagcatctaagcacgaaacttgccccgagatgagttctccctgaccctttaagggtcctgaaggaacgttgaagacgacgacgttgataggccgggtgtgtaagcgcagcgatgcgttgagctaaccggtactaatgaaccgtgaggcttaaccttacaacgccgaagctgttttggcggatgagagaagattttcagcctgatacagattaaatcagaacgcagaagcggtctgataaaacagaatttgcctggcggcagtagcgcggtggtcccacctgaccccatgccgaactcagaagtgaaacgccgtagcgccgatggtagtgtggggtctccccatgcgagagtagggaactgccaggcatcaaataaaacgaaaggctcagtcgaaagactgggcctttcgttttatctgttgtttgtcggtgaacgctctcctgagtaggacaaatccgccgggagcggatttgaacgttgcgaagcaacggcccggagggtggcgggcaggacgcccgccataaactgccaggcatcaaattaagcagaaggccatcctgacggatggcctttttgcgtttctacaaactcttcctgtcgtcatatctacaagccatccccccacagatacggtaaactagcctcgtttttgcatcaggaaagcagctatgaaccactccttaaaaccctggaacacatttggcattgatcataatgctcagcacattgtatgtgccgaagacgaacaacaattactcaatgcctggcagtatgcaaccgcagaaggacaacccgttcttattctgggtgaaggaagtaatgtactttttctggaggactatcgcggcacggtgatcatcaaccggatcaaaggtatcgaaattcatgatgaacctgatgcgtggtatttacatgtaggagccggagaaaactggcatcgtctggtaaaatacactttgcaggaaggtatgcctggtctggaaaatctggcattaattcctggttgtgtcggctcatcacctatccagaatattggtgcttatggcgtagaattacagcgagtttgcgcttatgttgattctgttgaactggcgacaggcaagcaagtgcgcttaactgccaaagagtgccgttttggctatcgcgacagtatttttaaacatgaataccaggaccgcttcgctattgtagccgtaggtctgcgtctgccaaaagagtggcaacctgtactaacgtatggtgacttaactcgtctggatcctacaacagtaacgccacagcaagtatttaatgcggtgtgtcatatgcgcaccaccaaactccctgatccaaaagtgaatggcaatgccggtagtttcttcaaaaaccctgttgtatctgccgaaacggctaaagcattactgtcacaatttccaacagcaccaaattacccccaggcggatggttcagtaaaactggcagcaggttggcttatcgatcagtgccagctaaaagggatgcaaataggtggggctgcggtgcaccgtcaacaggcgttagttctcattaatgaagacaatgcaaaaagcgaagatgttgtacagctggcgcatcatgtaagacagaaagttggtgaaaaatttaatgtctggcttgagcctgaagtccgctttattggtgcatcaggtgaagtgagcgcagtggagacaatttcatgaaggataacaccgtgccactgaaattgattgccctgttagcgaacggtgaatttcactctggcgagcagttgggtgaaacgctgggaatgagccgggcggctattaataaacacattcagacactgcgtgactggggcgttgatgtctttaccgttccgggtaaaggatacagcctgcctgagcctatccagttacttaatgctaaacagatattgggtcagctggatggcggtagtgtagccgtgctgccagtgattgactccacgaatcagtaccttcttgatcgtatcggagagcttaaatcgggcgatgcttgcattgcagaataccagcaggctggccgtggtcgccggggtcggaaatggttttcgccttttggcgcaaacttatatttgtcgatgttctggcgtctggaacaaggcccggcggcggcgattggtttaagtctggttatcggtatcgtgatggcggaagtattacgcaagctgggtgcagataaagttcgtgttaaatggcctaatgacctctatctgcaggatcgcaagctggcaggcattctggtggagctgactggcaaaactggcgatgcggcgcaaatagtcattggagccgggatcaacatggcaatgcgccgtgttgaagagagtgtcgttaatcaggggtggatcacgctgcaggaagcggggatcaatctcgatcgtaatacgttggcggccatgctaatacgtgaattacgtgctgcgttggaactcttcgaacaagaaggattggcaccttatctgtcgcgctgggaaaagctggataattttattaatcgcccagtgaaacttatcattggtgataaagaaatatttggcatttcacgcggaatagacaaacagggggctttattacttgagcaggatggaataataaaaccctggatgggcggtgaaatatccctgcgtagtgcagaaaaataagaaaggggagtattcgctcccctgcaaattatttgcgtagtctgacctcttctaccgcatgattagcacttttcgtcaggattaaactggcgcgctcacgagtaggtagaatattttgctttaagttcagccagttgatctctttccacaatgtcatggcagtcttaatcgcttcttctttagttaatttcgcgtagttatgaaaataggaatccgggtcggtaaaagccccttcgcggaatttcagaaaacggttgatataccatgtctgaagtaagtcttccggtgcatcaacatatatcgaaaaatcgacaaaatcagaaacaaatacatgatgtggatcgtgtggataatccatcccgctctgtaagacatttaacccttcaagaattaaaatatcaggctgaacaaccgttttatctccatccgggatcacatcataaataagatgtgagtaaacaggtgctgtaacgtttggcacgccggatttgagatcggaaacaaacttcaccaggcgatgcatatcatacgattccgggaagcctttcttcttcatcagaccacgttctttcagaacctgattagggtgaaggaagccatctgtagtgatcagttcaacacgacgatgttccggccaacggcttaatagcgcctgcaatacacgggcggttgtacttttccccaccgcgacactgccagcaatactgataatgtaaggaatgcgttgcccgttggtaccaagaaactgttccagaactgcctgacggcgcagattcgagcttatatagaagttcagcaaacgtgacaaaggtaaatagatctcggcaacttcttctaacgagagatcttcattaatacctttgagacgggcgatctcatcttccgataacgtcataggtacggaatcacgcagagctgcccactggttgcggtcaaactgtaggtaaggcgtcattaacgtttgctcttttatactcataagcatgtttctggcggtcatagctctatcggcaaagcgatatttgccatggcgcgtcacagttctgttgaatgggttaatgggcaggagggtaacaccagatggggaggaataataagaaaaaatctctgccaggaagctatcgttgaaaagcaatgtgacagatattccatctgataaaaagaattatggtttagcaggagcgcattgttgagcacaatgatgtgaaaaagtgtgctaatctgccctccgttcggctgtttcttcatcgtgtcgcataaaatgtgaccaataaaacaaattatgcaattttttagttgcatgaactcgcatgtctccatagaatgcgcgctacttgatgccgacttagctcagtaggtagagcaactgacttgtaatcagtaggtcaccagttcgattccggtagtcggcaccatcaagtccggtggggttcccgagcggccaaagggagcagactgtaaatctgccgtcacagacttcgaaggttcgaatccttcccccaccaccaatttcggccacgcgatggcgtagcccgagacgataagttcgcttaccggctcgaataaagagagcttctctcgatattcagtgcagaatgaaaatcaggtagccgagttccaggatgcgggcatcgtataatggctattacctcagccttccaagctgatgatgcgggttcgattcccgctgcccgctccaagatgtgctgatatagctcagttggtagagcgcacccttggtaagggtgaggtcggcagttcgaatctgcctatcagcaccacttcttttctcctccctgttttttccttctgtttattgcattcaacaagtcgggcatgttgcctggttgatgtggtgatatcaccgatttatccgtgtcttagagggacaatcgatgtctaaagaaaagtttgaacgtacaaaaccgcacgttaacgtcggtactatcggccacgttgaccatggtaaaacaacgctgaccgctgcaatcactaccgtactggctaaaacctacggcggtgctgctcgcgcattcgaccagatcgataacgcgccggaagaaaaagctcgtggtatcaccatcaacacttctcacgttgaatacgacaccccgacccgtcactacgcacacgtagactgcccggggcacgccgactatgttaaaaacatgatcaccggtgctgcgcagatggacggcgcgatcctggtagttgctgcgactgacggcccgatgccgcagactcgtgagcacatcctgctgggtcgtcaggtaggcgttccgtacatcatcgtgttcctgaacaaatgcgacatggttgatgacgaagagctgctggaactggttgaaatggaagttcgtgaacttctgtctcagtacgacttcccgggcgacgacactccgatcgttcgtggttctgctctgaaagcgctggaaggcgacgcagagtgggaagcgaaaatcctggaactggctggcttcctggattcttacattccggaaccagagcgtgcgattgacaagccgttcctgctgccgatcgaagacgtattctccatctccggtcgtggtaccgttgttaccggtcgtgtagaacgcggtatcatcaaagttggtgaagaagttgaaatcgttggtatcaaagagactcagaagtctacctgtactggcgttgaaatgttccgcaaactgctggacgaaggccgtgctggtgagaacgtaggtgttctgctgcgtggtatcaaacgtgaagaaatcgaacgtggtcaggtactggctaagccgggcaccatcaagccgcacaccaagttcgaatctgaagtgtacattctgtccaaagatgaaggcggccgtcatactccgttcttcaaaggctaccgtccgcagttctacttccgtactactgacgtgactggtaccatcgaactgccggaaggcgtagagatggtaatgccgggcgacaacatcaaaatggttgttaccctgatccacccgatcgcgatggacgacggtctgcgtttcgcaatccgtgaaggcggccgtaccgttggcgcgggcgttgtagcaaaagttctgagctaattgccgataacatttgacgcaatgcgcactaaaagggcatcatttgatgccctttttgcacgctttcgtaccagaacctggctcatcagtgattttctttgtcataatcattgctgagacaggctctgttgagggcgtataatccgaaaagctaatacgcgtttcgatttggtttgcctcgcgatcgcggggtgaaaatgtttgtagaaaacttctgacaggttggtttatgagtgcgaataccgaagctcaaggaagcgggcgcggcctggaagcgatgaagtgggtcgttgtggtggcattgctcctggtggcgattgtcggcaactatctttatcgcgacattatgctgccgctgcgtgcgctggccgtagtaattctgattgctgcagcgggtggtgtcgcgctgttaacgacaaaaggtaaagctaccgttgcttttgcccgtgaagcgcgtaccgaagtccgtaaggtcatttggccgactcgccaggaaacattgcacaccacgctgattgtggctgcggttaccgcagtaatgtcactgatcctgtggggactggatggtattctggttcgcctggtatcctttatcactggcctgaggttctgagatgtctgaagctcctaaaaagcgctggtacgtcgttcaggcgttttccggttttgaaggccgcgtagcaacgtcgctgcgtgagcatatcaaattacacaacatggaagatttgtttggtgaagtcatggtaccaaccgaagaagtggttgaaatccgtggcggtcagcgtcgcaaaagcgaacgtaaattcttccctggctacgtcctcgttcagatggtgatgaacgacgcgagctggcacctggtgcgcagcgtaccgcgtgtgatgggcttcatcggcggtacttccgatcgtcctgcgccaatcagcgataaagaagtcgatgcgattatgaaccgcctgcagcaggttggtgataagccgcgtccgaaaacgctgtttgaaccgggtgaaatggtccgtgttaatgatggtccgttcgctgacttcaacggtgttgttgaagaagtggattacgagaaatctcgtctgaaagtgtctgtttctatcttcggtcgtgcgaccccggtagagctggacttcagccaggttgaaaaagcctaacccagcgatcaaaaaagcggcgatttaatcgttgcacaaggcgtgagattggaatacaatttcgcgccttttgtttttatgggccttgcccgtaaaacgattttttatatcacggggagcctctcagaggcgttattacccaacttgaggaatttataatggctaagaaagtacaagcctatgtcaagctgcaggttgcagctggtatggctaacccgagtccgccagtaggtccggctctgggtcagcagggcgtaaacatcatggaattctgcaaagcgttcaacgcaaaaactgattccatcgaaaaaggtctgccgattccggtagtaatcaccgtttacgctgaccgttctttcactttcgttaccaagaccccgccggcagcagttctgctgaaaaaagcggctggtatcaagtctggttccggtaagccgaacaaagacaaagtgggtaaaatttcccgcgctcagctgcaggaaatcgcgcagaccaaagctgccgacatgactggtgccgacattgaagcgatgactcgctccatcgaaggtactgcacgttccatgggcctggtagtggaggactaagaaatggctaaactgaccaagcgcatgcgtgttatccgcgagaaagttgatgcaaccaaacagtacgacatcaacgaagctatcgcactgctgaaagagctggcgactgctaaattcgtagaaagcgtggacgtagctgttaacctcggcatcgacgctcgtaaatctgaccagaacgtacgtggtgcaactgtactgccgcacggtactggccgttccgttcgcgtagccgtatttacccaaggtgcaaacgctgaagctgctaaagctgcaggcgcagaactggtaggtatggaagatctggctgaccagatcaagaaaggcgaaatgaactttgacgttgttattgcttctccggatgcaatgcgcgttgttggccagctgggccaggttctgggtccgcgcggcctgatgccaaacccgaaagtgggtactgtaacaccgaacgttgctgaagcggttaaaaacgctaaagctggccaggttcgttaccgtaacgacaaaaacggcatcatccacaccaccatcggtaaagtggactttgacgctgacaaactgaaagaaaacctggaagctctgctggttgcgctgaaaaaagcaaaaccgactcaggcgaaaggcgtgtacatcaagaaagttagcatctccaccaccatgggtgcaggtgttgcagttgaccaggctggcctgagcgcttctgtaaactaatgcctttacgtgggcggtgattttgtctacaatcttacccccacgtataatgcttaatgcagacgtatatccgagatattcgggttgtggcaaggcggcaactgagtgagtcgccaggagcatagctaactatgtgactggtgcgaatgaaggaagccaacgccgtcacaagctgaatagcgacggatagaaaagatttgttcgttggagcctggcctatccaggcctccgtcgaagaccgcaggagtttcgcaagaaacttaatcccctgcgtagacggtgacagaacgctaagattattcttttatattctggcttgtttctgctcaccgtaattaagacgctctctccgtttggaggagtgaagtgagttccagagattttctctggcaaacatccaggagcaaagctaatggctttaaatcttcaagacaaacaagcgattgttgctgaagtcagcgaagtagccaaaggcgcgctgtctgcagtagttgcggattcccgtggcgtaactgtagataaaatgactgaactgcgtaaagcaggtcgcgaagctggcgtatacatgcgtgttgttcgtaacaccctgctgcgccgtgctgttgaaggtactccgttcgagtgcctgaaagacgcgtttgttggtccgaccctgattgcatactctatggaacacccgggcgctgctgctcgtctgttcaaagagttcgcgaaagcgaatgcaaaatttgaggtcaaagccgctgcctttgaaggtgagctgatcccggcgtctcagatcgaccgcctggcaactctgccgacctacgaagaagcaattgcacgcctgatggcaaccatgaaagaagcttcggctggcaaactggttcgtactctggctgctgtacgcgatgcgaaagaagctgcttaatcgcagttatctttttaacgcattcgcttacgtataaacttattctgatattcaggaacaatttaaatgtctatcactaaagatcaaatcattgaagcagttgcagctatgtctgtaatggacgttgtagaactgatctctgcaatggaagaaaaattcggtgtttccgctgctgctgctgtagctgtagctgctggcccggttgaagctgctgaagaaaaaactgaattcgacgtaattctgaaagctgctggcgctaacaaagttgctgttatcaaagcagtacgtggcgcaactggcctgggtctgaaagaagctaaagacctggtagaatctgcaccggctgctctgaaagaaggcgtgagcaaagacgacgcagaagcactgaaaaaagctctggaagaagctggcgctgaagttgaagttaaataagccaacccttccggttgcagcctgagaaatcaggctgatggctggtgactttttagtcaccagcctttttgcgctgtaaggcgccagtagcgtttcacactgtttgactactgctgtgcctttcaatgcttgtttctatcgacgacttaatatactgcgacaggacgtccgttctgtgtaaatcgcaatgaaatggtttaagcgtgatagcaacaggcattgcggaaagtgttccattttccggtcaacaaaatagtgttgcacaaactgtccgctcaatggacagatgggtcgacttgtcagcgagctgaggaaccctatggtttactcctataccgagaaaaaacgtattcgtaaggattttggtaaacgtccacaagttctggatgtaccttatctcctttctatccagcttgactcgtttcagaaatttatcgagcaagatcctgaagggcagtatggtctggaagctgctttccgttccgtattcccgattcagagctacagcggtaattccgagctgcaatacgtcagctaccgccttggcgaaccggtgtttgacgtccaggaatgtcaaatccgtggcgtgacctattccgcaccgctgcgcgttaaactgcgtctggtgatctatgagcgcgaagcgccggaaggcaccgtaaaagacattaaagaacaagaagtctacatgggcgaaattccgctcatgacagacaacggtacctttgttatcaacggtactgagcgtgttatcgtttcccagctgcaccgtagtccgggcgtcttctttgactccgacaaaggtaaaacccactcttcgggtaaagtgctgtataacgcgcgtatcatcccttaccgtggttcctggctggacttcgaattcgatccgaaggacaacctgttcgtacgtatcgaccgtcgccgtaaactgcctgcgaccatcattctgcgcgccctgaactacaccacagagcagatcctcgacctgttctttgaaaaagttatctttgaaatccgtgataacaagctgcagatggaactggtgccggaacgcctgcgtggtgaaaccgcatcttttgacatcgaagctaacggtaaagtgtacgtagaaaaaggccgccgtatcactgcgcgccacattcgccagctggaaaaagacgacgtcaaactgatcgaagtcccggttgagtacatcgcaggtaaagtggttgctaaagactatattgatgagtctaccggcgagctgatctgcgcagcgaacatggagctgagcctggatctgctggctaagctgagccagtctggtcacaagcgtatcgaaacgctgttcaccaacgatctggatcacggcccatatatctctgaaaccttacgtgtcgacccaactaacgaccgtctgagcgcactggtagaaatctaccgcatgatgcgccctggcgagccgccgactcgtgaagcagctgaaagcctgttcgagaacctgttcttctccgaagaccgttatgacttgtctgcggttggtcgtatgaagttcaaccgttctctgctgcgcgaagaaatcgaaggttccggtatcctgagcaaagacgacatcattgatgttatgaaaaagctcatcgatatccgtaacggtaaaggcgaagtcgatgatatcgaccacctcggcaaccgtcgtatccgttccgttggcgaaatggcggaaaaccagttccgcgttggcctggtacgtgtagagcgtgcggtgaaagagcgtctgtctctgggcgatctggataccctgatgccacaggatatgatcaacgccaagccgatttccgcagcagtgaaagagttcttcggttccagccagctgtctcagtttatggaccagaacaacccgctgtctgagattacgcacaaacgtcgtatctccgcactcggcccaggcggtctgacccgtgaacgtgcaggcttcgaagttcgagacgtacacccgactcactacggtcgcgtatgtccaatcgaaacccctgaaggtccgaacatcggtctgatcaactctctgtccgtgtacgcacagactaacgaatacggcttccttgagactccgtatcgtaaagtgaccgacggtgttgtaactgacgaaattcactacctgtctgctatcgaagaaggcaactacgttatcgcccaggcgaactccaacttggatgaagaaggccacttcgtagaagacctggtaacttgccgtagcaaaggcgaatccagcttgttcagccgcgaccaggttgactacatggacgtatccacccagcaggtggtatccgtcggtgcgtccctgatcccgttcctggaacacgatgacgccaaccgtgcattgatgggtgcgaacatgcaacgtcaggccgttccgactctgcgcgctgataagccgctggttggtactggtatggaacgtgctgttgccgttgactccggtgtaactgcggtagctaaacgtggtggtgtcgttcagtacgtggatgcttcccgtatcgttatcaaagttaacgaagacgagatgtatccgggtgaagcaggtatcgacatctacaacctgaccaaatacacccgttctaaccagaacacctgtatcaaccagatgccgtgtgtgtctctgggtgaaccggttgaacgtggcgacgtgctggcagacggtccgtccaccgacctcggtgaactggcgcttggtcagaacatgcgcgtagcgttcatgccgtggaatggttacaacttcgaagactccatcctcgtatccgagcgtgttgttcaggaagaccgtttcaccaccatccacattcaggaactggcgtgtgtgtcccgtgacaccaagctgggtccggaagagatcaccgctgacatcccgaacgtgggtgaagctgcgctctccaaactggatgaatccggtatcgtttacattggtgcggaagtgaccggtggcgacattctggttggtaaggtaacgccgaaaggtgaaactcagctgaccccagaagaaaaactgctgcgtgcgatcttcggtgagaaagcctctgacgttaaagactcttctctgcgcgtaccaaacggtgtatccggtacggttatcgacgttcaggtctttactcgcgatggcgtagaaaaagacaaacgtgcgctggaaatcgaagaaatgcagctcaaacaggcgaagaaagacctgtctgaagaactgcagatcctcgaagcgggtctgttcagccgtatccgtgctgtgctggtagccggtggcgttgaagctgagaagctcgacaaactgccgcgcgatcgctggctggagctgggcctgacagacgaagagaaacaaaatcagctggaacagctggctgagcagtatgacgaactgaaacacgagttcgagaagaaactcgaagcgaaacgccgcaaaatcacccagggcgacgatctggcaccgggcgtgctgaagattgttaaggtatatctggcggttaaacgccgtatccagcctggtgacaagatggcaggtcgtcacggtaacaagggtgtaatttctaagatcaacccgatcgaagatatgccttacgatgaaaacggtacgccggtagacatcgtactgaacccgctgggcgtaccgtctcgtatgaacatcggtcagatcctcgaaacccacctgggtatggctgcgaaaggtatcggcgacaagatcaacgccatgctgaaacagcagcaagaagtcgcgaaactgcgcgaattcatccagcgtgcgtacgatctgggcgctgacgttcgtcagaaagttgacctgagtaccttcagcgatgaagaagttatgcgtctggctgaaaacctgcgcaaaggtatgccaatcgcaacgccggtgttcgacggtgcgaaagaagcagaaattaaagagctgctgaaacttggcgacctgccgacttccggtcagatccgcctgtacgatggtcgcactggtgaacagttcgagcgtccggtaaccgttggttacatgtacatgctgaaactgaaccacctggtcgacgacaagatgcacgcgcgttccaccggttcttacagcctggttactcagcagccgctgggtggtaaggcacagttcggtggtcagcgtttcggggagatggaagtgtgggcgctggaagcatacggcgcagcatacaccctgcaggaaatgctcaccgttaagtctgatgacgtgaacggtcgtaccaagatgtataaaaacatcgtggacggcaaccatcagatggagccgggcatgccagaatccttcaacgtattgttgaaagagattcgttcgctgggtatcaacatcgaactggaagacgagtaattctcgctcaaacaggtcactgctgtcgggttaaaacccggcagcggattgtgctaactccgacgggagcaaatccgtgaaagatttattaaagtttctgaaagcgcagactaaaaccgaagagtttgatgcgatcaaaattgctctggcttcgccagacatgatccgttcatggtctttcggtgaagttaaaaagccggaaaccatcaactaccgtacgttcaaaccagaacgtgacggccttttctgcgcccgtatctttgggccggtaaaagattacgagtgcctgtgcggtaagtacaagcgcctgaaacaccgtggcgtcatctgtgagaagtgcggcgttgaagtgacccagactaaagtacgccgtgagcgtatgggccacatcgaactggcttccccgactgcgcacatctggttcctgaaatcgctgccgtcccgtatcggtctgctgctcgatatgccgctgcgcgatatcgaacgcgtactgtactttgaatcctatgtggttatcgaaggcggtatgaccaacctggaacgtcagcagatcctgactgaagagcagtatctggacgcgctggaagagttcggtgacgaattcgacgcgaagatgggggcggaagcaatccaggctctgctgaagagcatggatctggagcaagagtgcgaacagctgcgtgaagagctgaacgaaaccaactccgaaaccaagcgtaaaaagctgaccaagcgtatcaaactgctggaagcgttcgttcagtctggtaacaaaccagagtggatgatcctgaccgttctgccggtactgccgccagatctgcgtccgctggttccgctggatggtggtcgtttcgcgacttctgacctgaacgatctgtatcgtcgcgtcattaaccgtaacaaccgtctgaaacgtctgctggatctggctgcgccggacatcatcgtacgtaacgaaaaacgtatgctgcaggaagcggtagacgccctgctggataacggtcgtcgcggtcgtgcgatcaccggttctaacaagcgtcctctgaaatctttggccgacatgatcaaaggtaaacagggtcgtttccgtcagaacctgctcggtaagcgtgttgactactccggtcgttctgtaatcaccgtaggtccatacctgcgtctgcatcagtgcggtctgccgaagaaaatggcactggagctgttcaaaccgttcatctacggcaagctggaactgcgtggtcttgctaccaccattaaagctgcgaagaaaatggttgagcgcgaagaagctgtcgtttgggatatcctggacgaagttatccgcgaacacccggtactgctgaaccgtgcaccgactctgcaccgtctgggtatccaggcatttgaaccggtactgatcgaaggtaaagctatccagctgcacccgctggtttgtgcggcatataacgccgacttcgatggtgaccagatggctgttcacgtaccgctgacgctggaagcccagctggaagcgcgtgcgctgatgatgtctaccaacaacatcctgtccccggcgaacggcgaaccaatcatcgttccgtctcaggacgttgtactgggtctgtactacatgacccgtgactgtgttaacgccaaaggcgaaggcatggtgctgactggcccgaaagaagcagaacgtctgtatcgctctggtctggcttctctgcatgcgcgcgttaaagtgcgtatcaccgagtatgaaaaagatgctaacggtgaattagtagcgaaaaccagcctgaaagacacgactgttggccgtgccattctgtggatgattgtaccgaaaggtctgccttactccatcgtcaaccaggcgctgggtaaaaaagcaatctccaaaatgctgaacacctgctaccgcattctcggtctgaaaccgaccgttatttttgcggaccagatcatgtacaccggcttcgcctatgcagcgcgttctggtgcatctgttggtatcgatgacatggtcatcccggagaagaaacacgaaatcatctccgaggcagaagcagaagttgctgaaattcaggagcagttccagtctggtctggtaactgcgggcgaacgctacaacaaagttatcgatatctgggctgcggcgaacgatcgtgtatccaaagcgatgatggataacctgcaaactgaaaccgtgattaaccgtgacggtcaggaagagaagcaggtttccttcaacagcatctacatgatggccgactccggtgcgcgtggttctgcggcacagattcgtcagcttgctggtatgcgtggtctgatggcgaagccggatggctccatcatcgaaacgccaatcaccgcgaacttccgtgaaggtctgaacgtactccagtacttcatctccacccacggtgctcgtaaaggtctggcggataccgcactgaaaactgcgaactccggttacctgactcgtcgtctggttgacgtggcgcaggacctggtggttaccgaagacgattgtggtacccatgaaggtatcatgatgactccggttatcgagggtggtgacgttaaagagccgctgcgcgatcgcgtactgggtcgtgtaactgctgaagacgttctgaagccgggtactgctgatatcctcgttccgcgcaacacgctgctgcacgaacagtggtgtgacctgctggaagagaactctgtcgacgcggttaaagtacgttctgttgtatcttgtgacaccgactttggtgtatgtgcgcactgctacggtcgtgacctggcgcgtggccacatcatcaacaagggtgaagcaatcggtgttatcgcggcacagtccatcggtgaaccgggtacacagctgaccatgcgtacgttccacatcggtggtgcggcatctcgtgcggctgctgaatccagcatccaagtgaaaaacaaaggtagcatcaagctcagcaacgtgaagtcggttgtgaactccagcggtaaactggttatcacttcccgtaatactgaactgaaactgatcgacgaattcggtcgtactaaagaaagctacaaagtaccttacggtgcggtactggcgaaaggcgatggcgaacaggttgctggcggcgaaaccgttgcaaactgggacccgcacaccatgccggttatcaccgaagtaagcggttttgtacgctttactgacatgatcgacggccagaccattacgcgtcagaccgacgaactgaccggtctgtcttcgctggtggttctggattccgcagaacgtaccgcaggtggtaaagatctgcgtccggcactgaaaatcgttgatgctcagggtaacgacgttctgatcccaggtaccgatatgccagcgcagtacttcctgccgggtaaagcgattgttcagctggaagatggcgtacagatcagctctggtgacaccctggcgcgtattccgcaggaatccggcggtaccaaggacatcaccggtggtctgccgcgcgttgcggacctgttcgaagcacgtcgtccgaaagagccggcaatcctggctgaaatcagcggtatcgtttccttcggtaaagaaaccaaaggtaaacgtcgtctggttatcaccccggtagacggtagcgatccgtacgaagagatgattccgaaatggcgtcagctcaacgtgttcgaaggtgaacgtgtagaacgtggtgacgtaatttccgacggtccggaagcgccgcacgacattctgcgtctgcgtggtgttcatgctgttactcgttacatcgttaacgaagtacaggacgtataccgtctgcagggcgttaagattaacgataaacacatcgaagttatcgttcgtcagatgctgcgtaaagctaccatcgttaacgcgggtagctccgacttcctggaaggcgaacaggttgaatactctcgcgtcaagatcgcaaaccgcgaactggaagcgaacggcaaagtgggtgcaacttactcccgcgatctgctgggtatcaccaaagcgtctctggcaaccgagtccttcatctccgcggcatcgttccaggagaccactcgcgtgctgaccgaagcagccgttgcgggcaaacgcgacgaactgcgcggcctgaaagagaacgttatcgtgggtcgtctgatcccggcaggtaccggttacgcgtaccaccaggatcgtatgcgtcgccgtgctgcgggtgaagctccggctgcaccgcaggtgactgcagaagacgcatctgccagcctggcagaactgctgaacgcaggtctgggcggttctgataacgagtaatcgttaatccgcaaataacgtaaaaacccgcttcggcgggtttttttatggggggagtttagggaaagagcatttgtcagaatatttaaggaatttctgaatactcataatcaatgtagagatgactaatatcctgaaactgactgaactaattgagtcaaactcggcaaggattcgatactattcctgtgtaactttcttaaggaacgagaatgaaacaggaagtggaaaagtggcgaccttttggacatccggatggtgatattcgtgatttatcatttcttgatgctcatcaggctgtctacgttcagcatcatgagggcaaagagcctttagagtatcgcttttgggttacctactctcttcactgcttcacaaaagattatgaacatcagacgaacgaagaaaaacaatcgttaatgtaccacgcgcctaaagaatctcgtcccttctgccagcaccgttataacttagcgcgcacacacttaaaaagaactattttggcgctgccagaaagcaacgttattcatgccgggtatggtagctatgccgtgattgaggtggacttagacggaggagataaggcattttactttgttgcgttcagggctttcagggaaaagaaaaaactccgtttgcatgtaactagcgcttatcccatttctgaaaaacagaaaggtaaatcagtgaaatttttcaccattgcctacaacttattgagaaataagcagcttcctcagccctcaaaataacaaaacccaccttaaggtgggtttcgccagagaattatctctggtattcagaacgccattaccggactttgccttgaccttgcgataatcgcaggttgcgggatgtctgaatttcttcagtctgctgcatcctggaagatgagaacatgtgttcttattttcgtctctatcatagttgagtatttactctcttacaatcagatctctttcattgctcaacaggcgatggcttcagactttgcattacggaatttttaagaaaggcagggcgaaacgaggaagaagcttttcgccctggacaacattcctgctgacggcactaccataaaaaaacacaacgctttcaacaaccttgcgtttttcatcttccgtagcggctcggaataaatttacgttcttacattccgtctcatagtctttgcgaggcgcgtcccagatagctgtcccagtctttccataccggctgcaaaccctgagcggttaacgcggcagcaaccgcttccggtctgcgatcgtcgtgcggtgagaactgttccaactcggggtgattatcggcatagccacctggctgcgttttcgagaaggcgctgacgttattgatcgccagcggaataacgcgatcgcgaaaccacggtgattcccgcgtggagagtgacagttcaatctccggtgcaagcagtcggaaggcgcagatggtttgcactaactggcgttcatccataatcgacgcaggctcaatgccgccagtacacgggcgcaggcgcggaaaggagacagagtaacggctttgccagtaatgctgttgcagccatagcaaatgttcggcaaccatatagctgtcaacgcgccagttgtcggaaaggccaattagcgcgccgaggcctatcttatcaatccccgcacgccccagccgatccggcgtttccagccgccagaagaagtcctgttttttgcctttcagatgatggcgggcataagtcgcctcgtgatatgtctcctgataaaccatcacgccatccagaccaagttgctttaactcggcgtattccgtctccgccagcggttgcacttccatctgtagtgaagagaactgttcacgaagggcagggagatgacgacgaaagtaatccatccccactttcgcctgatgttcaccagtgactaacagcagatgttcaaagcccatctcccgtatagcggcactttccctggcaatatccgcttcatccagcgttttgcgcttgatgcgattactcatggaaaatccacagtacgtgcagtcgttagcgcaaagattggaaagataaagcgggacgtagaaactaactgtgttgccaaatcgctgacgggtcagacgctgcgcccgttgggccagttgttccagatagccactggcggcaggcgataacagcgccatcatgtcgtcgcgggtgagttgcgaggcatttagcgcccgctctacgtcagcagccgttttgccgttgatacgcaggcggatgtcgtcccagtccagttgtcgccagcgatcgctgaaggttttcatgccgatgcctccagaaatccggtcagcgggctggtggcatgagcaaaataactgcggctgcccggtccggactgacgtgccagtaggcctgcttctaccgccagacgaaatgccttcgccatgttgacgggatcgtccgcgacggcaatcgccgtattcactaacaccgcgtcggcccccatttccagcgcctgcgcggcatggctgggaacgccgatgccagcatcgacaaccaccggcactgtggcctgctggataataatctccagcatggcgcgggtttccagtccctgattcgagccaatcggcgcgccgagcggcatcaccgctgcacagccgacttcttccagacgtttacacaataccggatcggccccgcagtaaggcagcacgacaaatccctgttgtaccagcgtttcggcggctttcagggtttcgatgggatcgggcaacagccagcgggcgtcagggtgaatctctaattttaaccagtttgtgcctaacgcttcacgagccagatgggcggcgaaaatggcttcttccgctgttttcgccccggatgtatttggcagcagggtcacacccgccgcgataagcggttcgaggatagcgtcgttgtgctggcgcaagtcgacacgtttcatcgccagtgtcaccagctggctgccggaagcgcggatcgcctccaccatcagttgtgaagaagcgaatttccctgtgccggtaaacagatgtgaatcaaacgttttgtccgcaatacgtaacatttcaaccccctgcaataacctgaaaaagcaggatctggtcgccatcctgcacgatatgttgcgcccactgctcacgcgggacgatttgctgattaatcgccagagccgcgcccgcttgtcgttggtcgagttgctccagtagttcgtgaacagtttgcccggcggcgcactgcatcgcttgatcgttaaacaggatctgcattgcttcctccgcataccgggcaaccactggcgcggcgcaacgccaggctgcgccactggctcgatttaccgtcgaacagtcggagttctcccgcaggtgtctctataccgcttaataacttaatggcttccagtgcctgcaaagtgcccataaccccgaccaccgggccaaccacgcccgccgtgcggcagttgcgttctggctcctggttatctggccacaggcagcggtaacacccctgctcccagggcggcgtcagtaccatcaactgaccgccaaatccgaccgcgctggcggtgataagcggcgtgttgagtgccacgcaggcggcattaatctcctggcgagtcgccatattgtcggtacagtcgagcaccacatcggcccgtgcaaccgcatcttttaacgcctcacccgttaaccgttgttgtaatgctgtcagttgaatgtcgggattcaactgtgtcagtcgctgttggctgacctgcgatttcgggcgatcgatatcttcagtggtaaagaggatttgtcgttgcagattgcttaaatgcacatcgtcgtcatctgccagtaccagcgtcccgacgccagcgcccgccaggtacagcgcagcaggtgtacccagcccgcccagaccgataatcagcacctggctgtcgagcagtttttgctgcccgtccagagcgatatcgtcgagcaggatttggcggctataacgcataaagtcacggtcattcatcgccaactcctgcaatttccagcaactgtgccgttgccaaacgccagtctgcggcttgagtaatggcgctgacgacggcgatactgccgacacccgttgctatcaccgcaggcgcgcgtgccagactgataccgccaatcgccacggtgggataatccgccagtcgctcaacatgccgtgccagctgttccagcccctgcggtgcagaaggcatctgtttggtttgcgtcgggaacacatgtcccagcgcgatataagaggggcgtgctgccagcgcgacgtcgatttccatatcgtcatgtgtcgaaacgcccagccgcaggcctgccgcgcggatggcattgagatcggtggcttgcaaatcttcctgccccaaatggacgccatacgcctgatgcttgatcgccagccgccagtaatcgttgataaacaatcgcgcgttatagcggcggcccagcgcaattgccgccacgacatcggcttccacctcttcatcgcgccgatctttgatgcgtagctggagagtacgtacgcctgcatccaacagacgttcgatccactgtacgctgtccaccaccgggtacagtcctgaacgaaaaggtacaggaggaaaatcaggctgatacatcacgcttcctccttacgcaggtagatttctccgcctctggcacggaagttctccgacatatccgccattcccatttcaatagtttgcgtggcggcgtaatcacgcacttcctggctgattttcatcgagcagaatttcggcccacacatggagcaaaaatgggcgactttacctgactcttgcggcagggtttcatcgtgataagcgcgggcggtaaacgggtcgagggccagattaaactggtcttcccagcgaaattcgaagcgggctttcgacatggcgttatcgcgaatttgcgcgcccggatgccctttcgccaggtcagcggcgtgggcagcaatcttataggtgataagcccctgcttaacatcttctttattgggcagacccagatgctcttttggcgttacgtaacagagcatcgcgcagccaaaccagccaatcatcgccgcaccaatccccgacgtgaagtggtcatagcccggcgcaatatcggtagttagcggccccagagtgtaaaacggcgcttcgtggcagtgctctaactcctcggtcatattgcggcggatcatctgcatcggcacgtggcctgggccttcaatcatcacctgcacgtcatattcccaggcaattttggtcagttcgcccagcgtatgcagctcggcaaactgcgcttcatcgttggcgtcctgaatagaaccggggcgcagaccgtcgcccagcgacagcgaaacgtcataagcggcacagatttcacaaatttcgcggaagtgttgatagaggaaattttcctgatgatgggagaggcaccatttcgccataatcgaaccgccgcgagagacgataccggtcaggcgtttcgcggtcatcggcacatagcgcagcagtacgcccgcatggatagtgaagtaatccacaccttgctcggcctgttccagcagcgtgtcgcggaacgcttcccaggtaagatcttcggcgatcccgttaaccttctccagcgcctggtagatcggcactgtaccgatcggcaccgggctgttacgcaaaatccactcgcgggtttcgtgaatatagcgaccggtggagagatccatcaccgtatccgctccccagcgcgtggaccataccagcttttccacttcttcttcgatggaagaggtgaccgccgagttgccgatattggcgttaacttttaccaggaaattgcgaccaataatcatcggctccgattccggatgattaatgttggccgggataatcgcacgtccggcagcaacttcatcacggacaaattccgcagtgatattttccggcagatgtgcgccaaagctcattcccggatgctggtggcgtaaaacctcgctacggatgcgctcgcggcccatattctcgcggatggcgatgaattccatttccggcgtgatgatgccctggcgggcgtagtgcagttgggtgacacggcgtcctgctttggcgcgttttggtgttagtacgccgctaaaacgcagttcgtcgaggccatcatctgccagccgcgctttagtgtaatcggaactgcgcacggtaagttcttcggtatcgccgcgcgcatcgatccacggctggcgtagttttgccagcccttgctgcacgttaatggcaatctgcggatcaccatacgggccggaggtgtcgtagaccggaatcgcttcgttttcttcgtactgcggctgttctttgctaccgccaattagcgtcgggctaagctggatctcacgcatcggcacgcgcacgccggggtgtgtgccagtgatataaatgcgttttgagttgggaaaggcggtgccttccagggtgtcgataaaatgttgggcccgggcgcgttgttcgcggcgggtcagttttgttgcagacatagctcattccaaaaagttaaggacgtggcttgtcagacgacggatgaagcaagagacgatcgccgcaggggcgatgcgatagcagattaactcttgttcccttcgcaggtattagcctgatcaggttccgcggatcccgaataaacggtctcagccagttaaggcactccgacaagaaattagccccgcaaatggggcattgaatgtaaattacgcgttaacagcgcagaactcaagcaggatgtttgacgcgggcggcgtcaagcaccagcagaatcagcttatcttccagcacaaagcgcgcttccagcgcctcgccgatgtcagataaaacctgttgaaactcaaggtaattatcatgatcgatggcggtttccagactggaatcgtagtaatccataatctgttgagtattggcttcgagttgcggccaaatcttcgcggcgcgcgcgagttgcccgttgccttccagcttatgaagaatgcgctcataaatactgaaatgtccggcagacaagtaatcgaccaggctctgacaaaaatcatcaagggctttttcgtttagcctcatgtacgattctttgccaggcttaatgccaaccagattgtagtaagccacgagcagatgcttacgtacatgtagccagcgatcaaccagtttgttacttcctctgacgcgctccgtcaggttatcgagctggttaagcatgattgactccgcaagtttgtattcaaaaactgctcagtgagaaatgtaaaaaccatgttaaacatgccagtgatgcaaaggtagtgcaagagctatggatcgtataattgaaaaattagatcacggctggtgggtcgtcagccatgaacaaaaattatggttgccgaagggagaattgccatatggcgaagcggcaaatttcgatcttgtgggtcagcgcgcactacaaatcggcgaatggcagggggaacctgtttggttagtacaacagcagcggcgtcacgatatggggtcggtacgtcaggtcattgatctcgatgttgggctgtttcaactggccggacgaggcgtacaactggcggagttttaccgatcgcataaatactgtggttactgcgggcatgaaatgtatccgagcaaaaccgaatgggcgatgctgtgcagccattgccgtgagcgttactacccgcaaatcgccccctgcattattgttgccatccgtcgcgatgattcgatcctcctcgcccagcatacccgccatcgtaacggtgtccatacagtacttgccggattcgtcgaagtgggcgaaaccctcgagcaggcagtcgcgcgggaagtgatggaagagagcggaattaaagttaaaaacttgcgttacgtgacttctcagccgtggccgtttcctcagtctttaatgaccgcgtttatggcggaatatgacagcggcgacatcgtgatcgacccgaaagaattgctcgaggcgaactggtatcgctatgacgatttgccgttactcccgccgcccggcaccgtagcgcgccgtctgatagaagatacggtggcgatgtgtcgggcagagtatgagtgatgatacactgaccgcctgacgcactaaggaacagccaaaatgaccgaacttaaaaacgatcgttatctgcgggcgctgctgcgccagcccgttgatgtcactccagtatggatgatgcgccaggcgggtcgctatctaccggaatataaagccacgcgcgcccaggcaggcgattttatgtcgctgtgcaaaaacgccgagctggcgtgcgaagtgactttgcaaccgctgcgtcgctacccgctggatgcggcgatcctcttttccgatatcctcaccgtgccggacgcgatggggttagggctctattttgaagccggagaaggtccgcgttttacctcgccagtcacctgcaaagctgacgtcgataaactgccaattccggacccggaagatgaactgggttacgtgatgaacgcggtgcgtaccattcgtcgcgaactgaaaggcgaagtgccgctgattggtttttccggcagcccgtggacgctggcgacctacatggtggaaggcggcagcagcaaagccttcaccgtgatcaaaaaaatgatgtatgccgatccgcaggcgctgcacgctctgctcgataaactggcgaaaagcgtcactttgtatctgaatgcgcagattaaagccggtgctcaggcagtgatgattttcgacacctggggcggcgtgcttaccgggcgcgattatcaacagttctcgctctattacatgcataaaattgttgatggtttactgcgtgaaaacgacggtcgccgcgtaccggtcacgctgtttaccaaaggcggcggacagtggctggaagccatggcagaaaccggttgcgatgcgctgggcctcgactggacaacggacatcgccgatgcgcgccgccgtgtgggcaataaagtcgcgttgcagggtaatatggatccgtcgatgctgtacgcgccgcctgcccgcattgaagaagaagtagcgactatacttgcaggtttcggtcacggcgaaggtcatgtctttaaccttggtcacggcattcatcaggatgtgccgccagaacatgctggcgtgttcgtggaggcagtgcatcgactgtctgaacagtatcaccgctaaggagtgattatggatctcgcgtcattacgcgctcaacaaatcgaactggcttcttctgtgatccgcgaggatcgactcgataaagatccaccggatctgatcgccggagccgatgtcgggtttgagcagggcggagaagtgacgcgagcggcgatggtgctgctgaaatatccctcgcttgagctggtcgagtataaagttgcccgcatcgccaccaccatgccttacattccaggttttctttccttccgcgaatatcctgcgctgctggcagcgtgggagatgctgtcgcaaaagccggatttagtgtttgtcgatggtcatgggatctcgcatcctcgccgtcttggcgtcgccagccattttggcttattggtggatgtgccgaccattggcgtggcgaaaaaacggctctgcggtaaattcgaaccgctctccagcgaaccgggcgcgctggccccactgatggataaaggcgagcagctggcctgggtctggcgcagcaaagcgcgctgtaacccgttgtttatcgctaccggccatcgggtcagcgtggacagcgcgctggcgtgggtacaacgctgcatgaaaggctatcgtctgccggagccaacgcgctgggcggacgcggtggcctcggaacgtccggcgttcgtgcgctatacagcaaatcagccctaattcaggtaaactgcggataatttccgtatttgagaactcaacatgttacaaaacccaattcatctgcgtctggagcgcctggaaagctggcagcatgtcactttcatggcttgcttatgcgaacgcatgtaccccaattacgccatgttctgccagcaaaccggttttggtgatgggcaaatttaccgtcgcattctcgatctcatctgggaaacgctgaccgttaaagacgcaaaagtaaatttcgacagccaactggagaaatttgaagaagcgattccttcagccgacgatttcgatctgtacggcgtttatccggcaatcgatgcctgcgtggcgttaagtgaactggtccattcgcgtttgagtggtgaaacgctcgaacacgcggtggaagtgagtaagacctccatcacgaccgttgcgatgctggaaatgactcaggctggtcgcgaaatgagcgatgaagagcttaaagaaaacccagctgtagagcaagaatgggacattcagtgggaaatattccgacttttagctgagtgcgaagaacgcgatatcgagctgataaaaggccttagggcagacctgcgtgaggcgggtgagagcaatattggtataatttttcagcaataagaccagaaaacgtgatttaacgcctgatttgtcgtacctggagtcttccctttcgccccccgtctggtctacatttggggggcgaaaaaaagtggctatcggtgcgtgtatgcaggagagtgctattctggcatttccgtcgcactcgatgcttagcaagcgataaacacattgtaaggataacttatgaacaagactcaactgattgatgtaattgcagagaaagcagaactgtccaaaacccaggctaaagctgctctggagtccactctggctgcaattactgagtctctgaaagaaggcgatgctgtacaactggttggtttcggtaccttcaaagtgaaccaccgcgctgagcgtactggccgcaacccgcagaccggtaaagaaatcaaaattgccgcagctaacgtaccggcatttgtttctggcaaggcactgaaagacgcagttaagtaagattgcgtggcagtgaacagttttaacgaaggggtggtttcaccccttttgtctttctggcgtcgatcattgatgctggctggcgctctgcttctcactgcctgtagtcataactcttcacttcctccctttaccgccagtggatttgctgaagaccagggcgcggtacgcatctggcgaaaagacagcggcgataatgtgcatctgcttgccgtgtttagcccgtggcgcagtggcgataccacgacgcgagagtatcgctggcagggcgataacctcacgctcatcaatatcaatgtttacagcaaaccgccggtgaatattcgcgcgcgttttgacgatcgcggtgatctgagctttatgcaacgtgaatccgatggggaaaagcagcagctttctaacgaccaaatcgatttataccgttatcgtgctgatcagatccgccagattagcgatgccttacgtcaggggagagtcgtgctgcgccaggggcgctggcatgcgatggaacagaccgtgaccacctgcgaagggcaaaccattaaacctgatttagattcgcaggcgatagcgcatatcgagcgccgccagagccgctcttctgttgatgtcagcgtggcatggctggaagcgcccgaaggttcgcaattactgttagtggcaaactctgatttctgtcgctggcaacccaacgagaaaacgttctgatttaccagtggcccatacccatatgaccgccaccaccgcagccgccgtagcccatgcccattccggctccgcgcggaatacccgcttcagccatcgcgatatctcgtttcacccgtaactcatctaacgactgacgcaaattctccatctctttggcgaccgcgttaattttgctgctatccggtgggttcgcggctaacagggcattgtattcataacgcttcgtcaccagttgctgttgcagtgcgctgctttgagcgtaaaagtcattatggattttctgccacgctgtctgttgttcgctggtcaaaggcgcggcattttgctgccacataccgtgtccgccgtgagcaaatgcagatgtcgatcccatcgccattgctgaaagcgccatcattaccagggcaattttcgtgttccgtttcatggttaatcctccagtggttgtcttacttcgggtattgcatcttccgtgccaacgatgaaacgctgatatgacgggtaatctggcatgataaacgagtaaaaatgactcgcctgctgcgggtagcgagtcatttttactcattgaaacttaagcctttgtgttacagcgcagggtaagcgctgataaaagatggcatgatttctgctgtcagaaagggatgagcaggcaaagaagaagatgcgttttatgcaacgttctaaagactccttagctaaatggttaagcgcgatcctccccgtggtcattgttgggctggtgggattgtttgcggtaactgtgattcgtgattatgggcgggcaagcgaggcagaccgccaggcattactggaaaaaggtaatgtgcttatccgcgctctggagtcgggaagccgcgtagggatggggatgcgaatgcaccatgtacagcaacaggcgcttctggaagagatggcgggacagccgggagtgttgtggttcgcagtcaccgatgcgcagggcatcattattcttcatagcgaccccgataaggtcgggcgtgcgctctattcgccggatgaaatgcagaaattaaagccagaggaaaactcccgctggcggctgcttgggaaaacggaaactacgcctgcacttgaggtctatcgtttgttccagccaatgtcagcgccctggcggcatggaatgcacaatatgccgcgctgtaacggcaaagctgtgccacaagtagatgcacaacaggctatttttatcgccgttgatgccagtgatctggttgcaacccagagtggggaaaagcgcaataccctgattatcctcttcgccctggcgacggtcttgctggcaagcgtattgtcattcttctggtatcgccgctatctgcgctcgcgccagcttctacaagatgaaatgaagcgcaaagagaagctggtggcgctggggcatcttgcggcaggcgttgcccacgaaatccgtaacccactttcctcgattaaaggactggcgaaatactttgccgagcgcgcgcctgcagggggagaagcgcatcaactggcgcaggtgatggcgaaagaggccgaccgtttaaaccgcgtggtaagcgagttgctggaactggttaagccaacgcatctggctttgcaggcggtggatctcaacacgctgattaaccactcattacagctggtaagtcaggatgcaaacagccgggagatccagttacgctttaccgccaacgacacattaccggaaattcaggccgacccggacaggctgactcaggtcctgttgaatctctatctcaatgctattcaggcgattggtcagcatggcgtgattagcgtgacggccagcgaaagcggcgcgggcgtgaaaatcagcgttaccgacagcggtaagggaattgcggcagatcagcttgatgccatcttcactccgtacttcaccactaaagccgaaggcaccggattggggctggcggtcgtgcataatattgttgaacaacacggtggtacaattcaggtcgcaagccaggagggaaaaggctcaacgttcaccctctggcttccggtcaatattacgcgtaaggacccacaaggatgacgcacgataatatcgatattctggtggtggatgatgacattagccactgcactattttgcaggctttactgcgcggctggggctataacgtcgcgctggcgaacagcgggcgacaggcgttggagcaggtgcgggaacaggtttttgatcttgtgctttgcgatgtgcgaatggcggagatggacggcatcgccacgctgaaagagatcaaagcgttaaacccggcaattccggtgctgattatgactgcgtactccagcgtcgagacggcggtagaggcactgaaaactggggcgctggattatctcatcaagccgctggatttcgataacctacaggcgacgctggaaaaagcgctcgcgcatacgcacagtattgatgctgaaacacctgcggtgactgccagccagttcggtatggtcggtaaaagcccggcgatgcaacacctgctcagtgaaatcgccctcgtcgcgccatcggaagccacggtactgatccacggcgattccggcaccggtaaagagctggtcgccagggcgattcacgccagtagcgcacgtagcgaaaaaccgctggtaacgctcaactgtgcggcactcaacgaatccttgctggaatctgaattgttcggtcacgaaaaaggggcgtttactggagccgataaacgccgggaagggcgctttgttgaggcggacggcggcacgctgtttctcgatgaaattggcgatatctcgccgatgatgcaggtgcgtctgctgcgtgcgattcaggagcgcgaagttcagcgtgtcggtagcaaccagattatctcggttgatgtccggctgattgcggcgacccatcgcgatcttgccgcagaggtgaatgccgggcgttttcgccaggatctctactatcgcctgaatgtggtggcgattgaagtaccatcgctgcggcaacggcgggaagatatccctctgctggctggccattttctgcagcgctttgccgagcgtaatcgcaaggcggtaaaaggttttacgccccaggcgatggatctgttgattcattacgactggccgggaaatattcgtgagctggaaaacgcggtggaacgggcagtggtgctgctgaccggggaatatatttccgaacgcgagctgccgctggcgattgccagtacgccgatcccgctgggacaaagtcaggatattcagccgttggtggaagtggaaaaagaggtgattctggcggcgctggagaaaacgggcggcaacaaaaccgaagccgcccgtcagttagggatcacgcgcaaaacgctattggcaaaactgtcgcgttagttctgctcgcgttcgatagcgcgccagccgatatctttccggcagaagcagtcgtcccagtggatatcggtcattaaggcataggcgcgtttctgcgcttctgccacggtatgacccagcgcggtgacgcacagtacgcgcccgccgttggtcactacctgctcgtcatccgccagttttgtgcccgcgtggaacactttgccgcctgccacttcttccagcggcaggccgtggatcacgtcaccggtgcggtaatcacccggatatccacccgcagccatcaccacgccgagagaagcgcgttcatcccactcggacgttttctcgtccagtttgctttcacaggccgccaggcagagctcaaccagatcggacttcatgcgcagcataatcggctgggtttccggatcgccaaagcggcagttaaattcaataaccttcggattgccctgtttgtcgatcatcaggcccgcgtagagaaaaccggtgtaggtgttgccttccgccgccatgcctttcacggttggccagataatacgttccatggtgcgctgatgaacgtcatcggttactaccggcgcgggggagtaagcgcccatcccgccggtgtttggtccggtatctttatcgcctacgcgtttgtgatcctggctggtagccatcggcagcacatgctcgccgtccaccatcacgataaagctcgcttcttcgccatcgaggaactcttcgataacgatgcgatgacccgcgtcgccaaaagcgttgcccgccagcatatcgtgaacagccgcttccgcttcttccagcgtcatcgccacgataacgcctttcccggcagccagaccgtccgctttaatgacgattggcgcgcctttctcacgcagatacgccagcgcaggttctacctcggtgaagttctggtattccgccgtagggatcttatggcgggccaggaaatctttggtaaacgcttttgagccttccagttgggccgcacctgcggttgggccgaagattttcagcccggcggcgcggaaggtatcgaccacgcctttcaccagcggcgcttccgggccgacgatggtcagatcaatcttttcgttttgtgcgaaatccaacagcgccgggatatcggtcacgccaatagcaacgttttgcagcgcgggttccagtgcagtgcctgcattacccggagcaacaaaaacagtctcaaccagcggcgactgggccgctttccaggccagcgcgtgctcgcgcccgccgttaccaatcactaatactttcatctattgctccattaatggcggaagtggcgcatgtcggtgaagagcatcgcaataccgtgctcgtcggcggcggcaatcacttcgtcatcacggatagaaccgccaggctggattacgcaggtcacgcccgcagcggcggcggcatcaataccgtcgcggaacgggaagaacgcgtcagaagccatcgaggaacctttcacttccaggccttcatcggccgctttaataccggcgatttttgcggagtacacgcggctcatctggcccgcgccaatgccgatagtcatattgtttttggcatagacgatagcgttggatttcacaaacttcgccaccttccagcagaacagcgcatcacgcagttcctgttcgctcggctgacgtttggtcaccacgcgcagttcttccgcaccgaccatccccaggtcacgatcctgaaccagcagaccgccgttcacgcgtttgaaatcgaggcccggaacacgctcgccccactgaccgcaggtcagaacgcgtacgttctgtttggcggcggtgattttcagggcttcttcgctggcggacggcgcaataatcacttcgacaaactgacgagaaatgatggcctgtgcggtttccgcatccagctcgcggttaaaggcaatgatgccgccgaatgcggaggttgggtcggttttgtacgcgcgatcgtaagcatcaagaatggaattgccgatagccacgccgcaagggttggcgtgcttcacaatcacacatgccggctcggcgaactctttcacgcactccagcgccgcatcggtatcggcgatgttgttataagagagggctttaccctgaacctgggttgcggtagcaacggaggcttctttcacattctcttctatatagaaggcagcctgctggtggctgttctcgccgtaacgcatatccagcttcttaatgaagttcaggttcagcgtgcgtgggaagcgaccggcggcttctttgctttcaccgtggtaagccggaaccatgctgccgaagtagttggcaatcatgctgtcgtaggcggcagtgtgttcgaaggctttgatggcgaggtcgaaacgggttgcaagcgtcagcgatccttcgttgtcatccatctctttaataatggcgtcatagtcgctgctcttcaccacgattgcgacatctttatggttcttggcggcggagcgcaccatcgttgggccgccgatatcgatgttctcaaccgcatcttccagcgagcaaccttcacgggccacggtctgggcgaacggatacaggttaacaaccaccatatcgataggctggatctgatgttcttccataatggcatcgtcctggccgcgacggcccagaatgccaccatgtactttcggatgcagggtcttcacgcgtccatccatcatctccgggaaaccggtgtaatcggaaacttcggttaccggcagacctttttctgctaacagacgggcagtgccccctgtagacagcagctccacaccgcgtgcggaaagtgcctgggcgaattcgacgataccggctttgtcagaaacactgagcagagcgcggcggactggacgacgttgttgcatggtaaatcccctggatttgactattacagagagcgttagctgaatttttcgcgaaaaactcagctaacgcccctaacggggcatccttatttttcgcccgcattgtaacgaaaacgtttgcgcaacgctcgcgaatttttctctttcaatggtgatcacaattttgactgtggttaccgtgggcaaaatacagaaattacattgatgattgtggataactctgtgcgtaaaaaggtataaagcgggcttttgctggggaatgcagcagtcagtcatttttctgcaatttttctattgcggcctgcggagaactccctataatgcgcctccatcgacacggcggatgtgaatcacttcacacaaacagccggttcggttgaagagaaaaatcctgaaattcagggttgactctgaaagaggaaagcgtaatatacgccacctcgcgacagtgcgctaaagcgcgtcgcaactgctctttaacaatttatcagacaatctgtgtgggcactcgaagatacggattcttaacgtcgcaagacgaaaaatgaataccaagtctcaagagtgaacacgtaattcattacgaagtttaattctttgagcatcaaacttttaaattgaagagtttgatcatggctcagattgaacgctggcggcaggcctaacacatgcaagtcgaacggtaacaggaagaagcttgcttctttgctgacgagtggcggacgggtgagtaatgtctgggaaactgcctgatggagggggataactactggaaacggtagctaataccgcataacgtcgcaagaccaaagagggggaccttcgggcctcttgccatcggatgtgcccagatgggattagctagtaggtggggtaacggctcacctaggcgacgatccctagctggtctgagaggatgaccagccacactggaactgagacacggtccagactcctacgggaggcagcagtggggaatattgcacaatgggcgcaagcctgatgcagccatgccgcgtgtatgaagaaggccttcgggttgtaaagtactttcagcggggaggaagggagtaaagttaatacctttgctcattgacgttacccgcagaagaagcaccggctaactccgtgccagcagccgcggtaatacggagggtgcaagcgttaatcggaattactgggcgtaaagcgcacgcaggcggtttgttaagtcagatgtgaaatccccgggctcaacctgggaactgcatctgatactggcaagcttgagtctcgtagaggggggtagaattccaggtgtagcggtgaaatgcgtagagatctggaggaataccggtggcgaaggcggccccctggacgaagactgacgctcaggtgcgaaagcgtggggagcaaacaggattagataccctggtagtccacgccgtaaacgatgtcgacttggaggttgtgcccttgaggcgtggcttccggagctaacgcgttaagtcgaccgcctggggagtacggccgcaaggttaaaactcaaatgaattgacgggggcccgcacaagcggtggagcatgtggtttaattcgatgcaacgcgaagaaccttacctggtcttgacatccacggaagttttcagagatgagaatgtgccttcgggaaccgtgagacaggtgctgcatggctgtcgtcagctcgtgttgtgaaatgttgggttaagtcccgcaacgagcgcaacccttatcctttgttgccagcggtccggccgggaactcaaaggagactgttagtgataaactggaggaaggtggggatgacgtcaagtcatcatggcccttacgaccagggctacacacgtgctacaatggcgcatacaaagagaagcgacctcgcgagagcaagcggacctcataaagtgcgtcgtagtccggattggagtctgcaactcgactccatgaagtcggaatcgctagtaatcgtggatcagaatgccacggtgaatacgttcccgggccttgtacacaccgcccgtcacaccatgggagtgggttgcaaaagaagtaggtagcttaaccttcgggagggcgcttaccactttgtgattcatgactggggtgaagtcgtaacaaggtaaccgtaggggaacctgcggttggatcacctccttaccttaaagaagcgttctttgcagtgctcacacagattgtctgatagaaagtgaaaagcaaggcgtcttgcgaagcagactgatacgtccccttcgtctagaggcccaggacaccgccctttcacggcggtaacaggggttcgaatcccctaggggacgccacttgctggtttgtgagtgaaagtcacctgccttaatatctcaaaactcatcttcgggtgatgtttgagatatttgctctttaaaaatctggatcaagctgaaaattgaaacactgaacaacgaaagttgttcgtgagtctctcaaattttcgcaacacgatgatgaatcgtaagaaacatcttcgggttgtaaggttaagcgactaagcgtacacggtggatgccctggcagtcagaggcgatgaaggacgtgctaatctgcgataagcgtcggtaaggtgatatgaaccgttataaccggcgatttccgaatggggaaacccagtgtgtttcgacacactatcattaactgaatccataggttaatgaggcgaaccgggggaactgaaacatctaagtaccccgaggaaaagaaatcaaccgagattcccccagtagcggcgagcgaacggggagcagcccagagcctgaatcagtgtgtgtgttagtggaagcgtctggaaaggcgcgcgatacagggtgacagccccgtacacaaaaatgcacatgctgtgagctcgatgagtagggcgggacacgtggtatcctgtctgaatatggggggaccatcctccaaggctaaatactcctgactgaccgatagtgaaccagtaccgtgagggaaaggcgaaaagaaccccggcgaggggagtgaaaaagaacctgaaaccgtgtacgtacaagcagtgggagcacgcttaggcgtgtgactgcgtaccttttgtataatgggtcagcgacttatattctgtagcaaggttaaccgaataggggagccgaagggaaaccgagtcttaactgggcgttaagttgcagggtatagacccgaaacccggtgatctagccatgggcaggttgaaggttgggtaacactaactggaggaccgaaccgactaatgttgaaaaattagcggatgacttgtggctgggggtgaaaggccaatcaaaccgggagatagctggttctccccgaaagctatttaggtagcgcctcgtgaattcatctccgggggtagagcactgtttcggcaagggggtcatcccgacttaccaacccgatgcaaactgcgaataccggagaatgttatcacgggagacacacggcgggtgctaacgtccgtcgtgaagagggaaacaacccagaccgccagctaaggtcccaaagtcatggttaagtgggaaacgatgtgggaaggcccagacagccaggatgttggcttagaagcagccatcatttaaagaaagcgtaatagctcactggtcgagtcggcctgcgcggaagatgtaacggggctaaaccatgcaccgaagctgcggcagcgacgcttatgcgttgttgggtaggggagcgttctgtaagcctgcgaaggtgtgctgtgaggcatgctggaggtatcagaagtgcgaatgctgacataagtaacgataaagcgggtgaaaagcccgctcgccggaagaccaagggttcctgtccaacgttaatcggggcagggtgagtcgacccctaaggcgaggccgaaaggcgtagtcgatgggaaacaggttaatattcctgtacttggtgttactgcgaaggggggacggagaaggctatgttggccgggcgacggttgtcccggtttaagcgtgtaggctggttttccaggcaaatccggaaaatcaaggctgaggcgtgatgacgaggcactacggtgctgaagcaacaaatgccctgcttccaggaaaagcctctaagcatcaggtaacatcaaatcgtaccccaaaccgacacaggtggtcaggtagagaataccaaggcgcttgagagaactcgggtgaaggaactaggcaaaatggtgccgtaacttcgggagaaggcacgctgatatgtaggtgaagcgacttgctcgtggagctgaaatcagtcgaagataccagctggctgcaactgtttattaaaaacacagcactgtgcaaacacgaaagtggacgtatacggtgtgacgcctgcccggtgccggaaggttaattgatggggttagcgcaagcgaagctcttgatcgaagccccggtaaacggcggccgtaactataacggtcctaaggtagcgaaattccttgtcgggtaagttccgacctgcacgaatggcgtaatgatggccaggctgtctccacccgagactcagtgaaattgaactcgctgtgaagatgcagtgtacccgcggcaagacggaaagaccccgtgaacctttactatagcttgacactgaacattgagccttgatgtgtaggataggtgggaggctttgaagtgtggacgccagtctgcatggagccgaccttgaaataccaccctttaatgtttgatgttctaacgttgacccgtaatccgggttgcggacagtgtctggtgggtagtttgactggggcggtctcctcctaaagagtaacggaggagcacgaaggttggctaatcctggtcggacatcaggaggttagtgcaatggcataagccagcttgactgcgagcgtgacggcgcgagcaggtgcgaaagcaggtcatagtgatccggtggttctgaatggaagggccatcgctcaacggataaaaggtactccggggataacaggctgataccgcccaagagttcatatcgacggcggtgtttggcacctcgatgtcggctcatcacatcctggggctgaagtaggtcccaagggtatggctgttcgccatttaaagtggtacgcgagctgggtttagaacgtcgtgagacagttcggtccctatctgccgtgggcgctggagaactgaggggggctgctcctagtacgagaggaccggagtggacgcatcactggtgttcgggttgtcatgccaatggcactgcccggtagctaaatgcggaagagataagtgctgaaagcatctaagcacgaaacttgccccgagatgagttctccctgactccttgagagtcctgaaggaacgttgaagacgacgacgttgataggccgggtgtgtaagcgcagcgatgcgttgagctaaccggtactaatgaaccgtgaggcttaaccttacaacgccgaaggtgttttggcggattgagagaagattttcagcctgatacagattaaatcagaacgcagaagcggtctgataaaacagaatttgcctggcggcagtagcgcggtggtcccacctgaccccatgccgaactcagaagtgaaacgccgtagcgccgatggtagtgtggggtctccccatgcgagagtagggaactgccaggcatcaaattagaaaaaccccggtccataaggccggggttttttgcatatcaattatttgcatgatgaagggaatctcatgtcagttctgtatatccaaattcgtcgtaatcaaattactgttcgcgatcttgaaagcaaacgtgaagtgtcaggagacgctgccttcagtaaccagcgcctgttaatcgccaatttctttgttgcagaaaaagttctgcaagatcttgttctgcaactccacccacgttcaacctggcattcttttttgccagcaaaacgtatggatattgttgtgagcgcactggaaatgaatgagggcggtttgtcacaggttgaggaacgcattctccatgaagtggtcgctggggcaacgttaatgaaatatcgccagttccacatccatgcgcaatcagcggtactcagtgatagtgcggtcatggcaatgcttaagcagaaataatcgtgtcaccattggtgggtactaaacctgaagttcagcccaccgggatgagaaaaaatcgcctacgcccccacatacgccagattcagcaacggatacggtttccccaaatcgtccacctcagagcgtcccgtaaccttaaaacccaccttcttatagaacccaaccgcctgctcattttgctcattaacgttggttgtcagttccggtgccatcgagagcgcatgctccaccagcacccgacctacgccgcagccgcgcacatcaggatcgataaacagcgcatccatatgctgcccacttagcaacataaatccaaccggctgatcccgctcattaaccgcgacccacaacggcgcttccggcaggaaggaacgaactaggtcctccagctcggtccgatactctgctgatagaaaatcgtgagtggcatcgacagaacgacaccaaatcgcaacgagttcctccccttcctcatgccgtgagcggcgaatactaataaccattttctctccttttagtcattcttatattctaacgtagtcttttccttgaaactttctcaccttcaacatgcaggctcgacattggcaaattttctggttatcttcagctatctggatgtctaaacgtataagcgtatgtagtgaggtaatcaggttatgccgattcgtgtgccggacgagctacccgccgtcaatttcttgcgtgaagaaaacgtctttgtgatgacaacttctcgtgcgtctggtcaggaaattcgtccacttaaggttctgatccttaacctgatgccgaagaagattgaaactgaaaatcagtttctgcgcctgctttcaaactcacctttgcaggtcgatattcagctgttgcgcatcgattcccgtgaatcgcgcaacacgcccgcagagcatctgaacaacttctactgtaactttgaagatattcaggatcagaactttgacggtttgattgtaactggtgcgccgctgggcctggtggagtttaatgatgtcgcttactggccgcagatcaaacaggtgctggagtggtcgaaagatcacgtcacctcgacgctgtttgtctgctgggcggtacaggccgcgctcaatatcctctacggcattcctaagcaaactcgcaccgaaaaactctctggcgtttacgagcatcatattctccatcctcatgcgcttctgacgcgtggctttgatgattcattcctggcaccgcattcgcgctatgctgactttccggcagcgttgattcgtgattacaccgatctggaaattctggcagagacggaagaaggggatgcatatctgtttgccagtaaagataagcgcattgcctttgtgacgggccatcccgaatatgatgcgcaaacgctggcgcaggaatttttccgcgatgtggaagccggactagacccggatgtaccgtataactatttcccgcacaatgatccgcaaaatacaccgcgagcgagctggcgtagtcacggtaatttactgtttaccaactggctcaactattacgtctaccagatcacgccatacgatctacggcacatgaatccaacgctggattaatcttctgtgatagtcgatcgttaagcgattcagcaccttacctcaggcaccttcgggtgccttttttatttccgaaacgtacctcagcaggtgaataaattttattcatattgttatcaacaagttatcaagtatttttaattaaaatggaaattgtttttgattttgcattttaaatgagtagtcttagttgtgctgaacgaaaagagcacaacgatccttcgttcacagtggggaagttttcggatccatgacgaggagctgcacgatgactgaacaggcaacaacaaccgatgaactggctttcacaaggccgtatggcgagcaggagaagcaaattcttactgccgaagcggtagaatttctgactgagctggtgacgcattttacgccacaacgcaataaacttctggcagcgcgcattcagcagcagcaagatattgataacggaacgttgcctgattttatttcggaaacagcttccattcgcgatgctgattggaaaattcgcgggattcctgcggacttagaagaccgccgcgtagagataactggcccggtagagcgcaagatggtgatcaacgcgctcaacgccaatgtgaaagtctttatggccgatttcgaagattcactggcaccagactggaacaaagtgatcgacgggcaaattaacctgcgtgatgcggttaacggcaccatcagttacaccaatgaagcaggcaaaatttaccagctcaagcccaatccagcggttttgatttgtcgggtacgcggtctgcacttgccggaaaaacatgtcacctggcgtggtgaggcaatccccggcagcctgtttgattttgcgctctatttcttccacaactatcaggcactgttggcaaagggcagtggtccctatttctatctgccgaaaacccagtcctggcaggaagcggcctggtggagcgaagtcttcagctatgcagaagatcgctttaatctgccgcgcggcaccatcaaggcgacgttgctgattgaaacgctgcccgccgtgttccagatggatgaaatccttcacgcgctgcgtgaccatattgttggtctgaactgcggtcgttgggattacatcttcagctatatcaaaacgttgaaaaactatcccgatcgcgtcctgccagacagacaggcagtgacgatggataaaccattcctgaatgcttactcacgcctgttgattaaaacctgccataaacgcggtgcttttgcgatgggcggcatggcggcgtttattccgagcaaagatgaagagcacaataaccaggtgctcaacaaagtaaaagcggataaatcgctggaagccaataacggtcacgatggcacatggatcgctcacccaggccttgcggacacggcaatggcggtattcaacgacattctcggctcccgtaaaaatcagcttgaagtgatgcgcgaacaagacgcgccgattactgccgatcagctgctggcaccttgtgatggtgaacgcaccgaagaaggtatgcgcgccaacattcgcgtggctgtgcagtacatcgaagcgtggatctctggcaacggctgtgtgccgatttatggcctgatggaagatgcggcgacggctgaaatttcccgtacctcgatctggcagtggatccatcatcaaaaaacgttgagcaatggcaaaccggtgaccaaagccttgttccgccagatgctgggcgaagagatgaaagtcattgccagcgaactgggcgaagaacgtttctcccaggggcgttttgacgatgccgcacgcttgatggaacagatcaccacttccgatgagttaattgatttcctgaccctgccaggctaccgcctgttagcgtaaaccaccacataactatggagcatctgcacatgaaaacccgtacacaacaaattgaagaattacagaaagagtggactcaaccgcgttgggaaggcattactcgcccatacagtgcggaagatgtggtgaaattacgcggttcagtcaatcctgaatgcacgctggcgcaactgggcgcagcgaaaatgtggcgtctgctgcacggtgagtcgaaaaaaggctacatcaacagcctcggcgcactgactggcggtcaggcgctgcaacaggcgaaagcgggtattgaagcagtctatctgtcgggatggcaggtagcggcggacgctaacctggcggccagcatgtatccggatcagtcgctctatccggcaaactcggtgccagctgtggtggagcggatcaacaacaccttccgtcgtgccgatcagatccaatggtccgcgggcattgagccgggcgatccgcgctatgtcgattacttcctgccgatcgttgccgatgcggaagccggttttggcggtgtcctgaatgcctttgaactgatgaaagcgatgattgaagccggtgcagcggcagttcacttcgaagatcagctggcgtcagtgaagaaatgcggtcacatgggcggcaaagttttagtgccaactcaggaagctattcagaaactggtcgcggcgcgtctggcagctgacgtgacgggcgttccaaccctgctggttgcccgtaccgatgctgatgcggcggatctgatcacctccgattgcgacccgtatgacagcgaatttattaccggcgagcgtaccagtgaaggcttcttccgtactcatgcgggcattgagcaagcgatcagccgtggcctggcgtatgcgccatatgctgacctggtctggtgtgaaacctccacgccggatctggaactggcgcgtcgctttgcacaagctatccacgcgaaatatccgggcaaactgctggcttataactgctcgccgtcgttcaactggcagaaaaacctcgacgacaaaactattgccagcttccagcagcagctgtcggatatgggctacaagttccagttcatcaccctggcaggtatccacagcatgtggttcaacatgtttgacctggcaaacgcctatgcccagggcgagggtatgaagcactacgttgagaaagtgcagcagccggaatttgccgccgcgaaagatggctataccttcgtatctcaccagcaggaagtgggtacaggttacttcgataaagtgacgactattattcagggcggcacgtcttcagtcaccgcgctgaccggctccactgaagaatcgcagttctaagcaacaacaaccgttgctgactgtaggccggataaggcgttcacgccgcatccggcaatcggtgcacgatgcctgatgcgacgcttgcgcgtcttatcatgcctacagccgttgccgaacgtaggctggataaggcgtttacgccgcatccggcaattctctgctcctgatgagggcgctaaatgccgcgtggcctggaattattgattgctcaaaccattttgcaaggcttcgatgctcagtatggtcgattcctcgaagtgacctccggtgcgcagcagcgtttcgaacaggccgactggcatgctgtccagcaggcgatgaaaaaccgtatccatctttacgatcatcacgttggtctggtcgtggagcaactgcgctgcattactaacggccaaagtacggacgcggcatttttactacgtgttaaagagcattacacccggctgttgccggattacccgcgcttcgagattgcggagagcttttttaactccgtgtactgtcggttatttgaccaccgctcgcttactcccgagcggctttttatctttagctctcagccagagcgccgctttcgtaccattccccgcccgctggcgaaagactttcaccccgatcacggctgggaatctctactgatgcgcgttatcagcgacctaccgctgcgcctgcgctggcagaataaaagccgtgacatccattacattattcgccatctgacggaaacgctggggacagacaacctcgcggaaagtcatttacaggtggcgaacgaactgttttaccgcaataaagccgcctggctggtaggcaaactgatcacaccttccggcacattgccatttttgctgccgatccaccagacggacgacggcgagttatttattgatacctgcctgacgacgaccgccgaagcgagcattgtttttggctttgcgcgttcttattttatggtttatgcgccgctgcccgcagcgctggtcgagtggctacgggaaattctgccaggtaaaaccaccgctgaattgtatatggctatcggctgccagaagcacgccaaaaccgaaagctaccgcgaatatctcgtttatctacagggctgtaatgagcagttcattgaagcgccgggtattcgtggaatggtgatgttggtgtttacgctgccgggctttgatcgggtattcaaagtcatcaaagacaggttcgcgccgcagaaagagatgtctgccgctcacgttcgtgcctgctatcaactggtgaaagagcacgatcgcgtgggccgaatggcggacacccaggagtttgaaaactttgtgctggagaagcggcatatttccccggcattaatggaattactgcttcaggaagcagcggaaaaaatcaccgatctcggcgaacaaattgtgattcgccatctttatattgagcggcggatggtgccgctcaatatctggctggaacaagtggaaggtcagcagttgcgcgacgccattgaagaatacggtaacgctattcgccagcttgccgctgctaacattttccctggcgacatgctgtttaaaaacttcggtgtcacccgtcacgggcgtgtggttttttatgattacgatgaaatttgctacatgacggaagtgaatttccgcgacatcccgccgccgcgctatccggaagacgaacttgccagcgaaccgtggtacagcgtctcgccgggcgatgttttcccggaagagtttcgccactggctatgcgccgacccgcgtattggtccgctgtttgaagagatgcacgccgacctgttccgcgctgattactggcgcgcactacaaaaccgcatacgtgaagggcatgtggaagatgtttatgcgtatcggcgcaggcaaagatttagcgtacggtatggggagatgcttttttgagtaaagcttccatataatttttctccgcaatgtatcgagggttatccgtaaagccaaagctttcagccatcttatttaatgtattaaggattaattcagcaataacccggtgaccaaattcaaaagccaactcaaaggcagagtatttttgtggggctttgtgttgccaaaaatccataatatcttcagcggtaaatccaaacaggcgtgcatggtcagataaagcaagataaaccgtctctacaacattttgttgtttatgctgtatcgctgaaaacaaaccgggatattcattagaattatttgccaggaggaggggcttcatattttttttatcgaatttaaacgtattaaacagagtgggtaatgcgttaaaaatagtattaataacgttcatgtgtccgcgctgcatggccataaacaaacccgtgtcgcgcgcaagacttttagcggtcagaagatctacaatatcggaagctgaaatgttaatttcctgggctaggctgggcaatgcttcaagaataactttcacgatatcgctatgtccattttgcatcgccagatatagtcctgggcaaccataaaaatcctttgccttcaggagatcgagtacctgttctttagtcaaatgacatgtgcgaattaacaaaggtaacgcgttcaaaacaattttcagcatgtcggcatcaccattcgccataacatggtataaaacatggctggacgttctatttttggcactcaggaatttatacacttgttcgttatctaaatgatgtgttgcggccagtttaggtaaggcgttcagaatcgaggttacaacatttttatccttacgtgatatcgctaaaaataatccagaaaaaccatttttatcttttgcctccagaatatgcatgagattttttttcgagagtaatccttcatatcctgtttctgacaatgaattgaaaatagtctcaacgatatccgcattaccataatttatagccaaatataaacctggcaggttaatactattataggcagtcaacatttctgttctatgtagttctggcattttctggagttgaatcatcagttgcgtaagttggtgattctgaccaattgccattagcaaattcatcgttgcaggtgataatggaggggttatttcatccacagatccttttaacatcaatagctgttctttcggaagtgctggaattattgcaacagattgattaataacatgatcatttgaccatttcaggaggctataatctacattcataaaatccatcagagaatagtgtttaatattctctttgctttcgctcataattcttattttatcgttagttacattaggatcataaaccgaaaccacgtaatgggtacatccttcagttgtgttctttattcttagccggaccgtcaaagcatggttatccaccagtaatatggctgccataacactgatgccatttgattccatcttgtcaaaatatgctttcataactagcccgaaatcaccgcaggcagcaacgcaacgcccctcaggacggctggaaaccaacgccaaagtctggtttttgcattttttgttgaagtgcgtgagaaatttttcagctgaagagtaatcatcttgatggggtttgtaatcaacattctgataaatatcattaatatattgtgcagcaatgtgtcggcatactatacggttttggggtcgccccggaaaataacattgaccattaagtttaattcttgggaattctttttcttttctatctgattttaggtttaattcttgtttatcaagagtgtctgagcgttgaggtaaaatttccattaggtatttttcaaatattggggcaatggtttgagtaagtgtcgtgttttcgtttttattaattatcgtaatttctttcttatcagcttgtaagacggacgtggaaaatttaatgacaaaatccttgttgctaaagatatgacgaccattttgtctacagttctctgagaagctttttaatagaggcgtcgccagctccttgccagaaaatttatcctcgagttctttataaaacaattcactcagggtttggtgttcatttgtctgggctgtattattaatatttgcagagaaagaactacgaggaatacgagtaatcatttaaatatctcattgtttattgatgtcttgaattttaactatcagaacagtgaaaaaatttaatatgattacaactaaagaaatatcataaatcgctcaatctcataatgcagccgtaaaagtttcggtggaatgagatcttgcgattttgttaataattaagtggtttgatgtttaaaaataatgctgagttaataaaagtgtgtgaagtgtatgacattaagttattttggcgtcaatgcgattaacagacacccttattctattgccactcaggtatgatgggcagaatattgcctctgcccgccagaaaaagtcagcgcattccaccgtacgccagcgtcacttccttcgccgctttaatcaccatcgcgccaaactcggtcacgcggtcatcggtaatacgtgaaatcggtccggaaatagaaattgcggcaaacggttcacggtgctcatcgaaaatacacgctgcaaggcaacgtagccccagtgcatgttcctcatcgtcaaatgaataaccccgtttgcgcgtttgggcgagatcttcttttaaatgcacaggagacaccagcgttgcgtgggtataggcatgtaaccctttgcggtgcagcagcttcgtcacctgttcttcgctcagttgggctaaaaaggctttacccgcaccggaagcgtgcatcggcaatttaccgccgataggcgcggacattcgcatcagatgcgtacactgtacctggtcgataataatcgcttcgtgatcgctttgatcaagcaccgccatattgaccgtttcgccagactcttccattagattgcgcaggatagggtgaacaatcgctaacaaattacggctctggagaaagctgctgccgaccataaaggcatgtgcgccgattgcccaatgtcccagttcgccaacctgacgcacgaaaccctgctgttgcatcgtggttagcaggcggtgggtcgtggaattgggtaacccggcttgttgcgccagttccgtgagtgccacactgccattggattcggcaatccactccagtaatttcaggccacgcgttaaagactgaacctgtccagtcgctggtgcggtggcaacggcgggttttctgccgcgtttcgcgggaatgggtgcgaccatgacagtctcttttttctgtatcgtggaaatcattttcatttttattgttagctaatgcaatagttactgaactgatccgatgagttaatgttgaacaaatctcatgttgcgtggtggtcgcttttaccacagatgcgtttatgccagtatggtttgttgaatttttattaaatctgggttgagcgtgtcgggagcaagtgtgagcagcaaagtggaacaactgcgtgcgcagttaaatgaacgtattctggtgctggacggcggtatgggcaccatgatccagagttatcgactgaacgaagccgattttcgtggtgaacgctttgccgactggccatgcgacctcaaaggcaacaacgacctgctggtactcagtaaaccggaagtgatcgccgctatccacaacgcctactttgaagcgggcgcggatatcatcgaaaccaacaccttcaactccacgaccattgcgatggcggattaccagatggaatccctgtcggcggaaatcaactttgcggcggcgaaactggcgcgagcttgtgctgacgagtggaccgcgcgcacgccagagaaaccgcgctacgttgccggtgttctcggcccgaccaaccgcacggcgtctatttctccggacgtcaacgatccggcatttcgtaatatcacttttgacgggctggtggcggcttatcgagagtccaccaaagcgctggtggaaggtggcgcggatctgatcctgattgaaaccgttttcgacacccttaacgccaaagcggcggtatttgcggtgaaaacggagtttgaagcgctgggcgttgagctgccgattatgatctccggcaccatcaccgacgcctccgggcgcacgctctccgggcagaccaccgaagcattttacaactcattgcgccacgccgaagctctgacctttggcctgaactgtgcgctggggcccgatgaactgcgccagtacgtgcaggagctgtcacggattgcggaatgctacgtcaccgcgcacccgaacgccgggctacccaacgcctttggtgagtacgatctcgacgccgacacgatggcaaaacagatacgtgaatgggcgcaagcgggttttctcaatatcgtcggcggctgctgtggcaccacgccacaacatattgcagcgatgagtcgtgcagtagaaggattagcgccgcgcaaactgccggaaattcccgtagcctgccgtttgtccggcctggagccgctgaacattggcgaagatagcctgtttgtgaacgtgggtgaacgcaccaacgtcaccggttccgctaagttcaagcgcctgatcaaagaagagaaatacagcgaggcgctggatgtcgcgcgtcaacaggtggaaaacggcgcgcagattatcgatatcaacatggatgaagggatgctcgatgccgaagcggcgatggtgcgttttctcaatctgattgccggtgaaccggatatcgctcgcgtgccgattatgatcgactcctcaaaatgggacgtcattgaaaaaggtctgaagtgtatccagggcaaaggcattgttaactctatctcgatgaaagagggcgtcgatgcctttatccatcacgcgaaattgttgcgtcgctacggtgcggcagtggtggtaatggcctttgacgaacagggacaggccgatactcgcgcacggaaaatcgagatttgccgtcgggcgtacaaaatcctcaccgaagaggttggcttcccgccagaagatatcatcttcgacccaaacatcttcgcggtcgcaactggcattgaagagcacaacaactacgcgcaggactttatcggcgcgtgtgaagacatcaaacgcgaactgccgcacgcgctgatttccggcggcgtatctaacgtttctttctcgttccgtggcaacgatccggtgcgcgaagccattcacgcagtgttcctctactacgctattcgcaatggcatggatatggggatcgtcaacgccgggcaactggcgatttacgacgacctacccgctgaactgcgcgacgcggtggaagatgtgattcttaatcgtcgcgacgatggcaccgagcgtttactggagcttgccgagaaatatcgcggcagcaaaaccgacgacaccgccaacgcccagcaggcggagtggcgctcgtgggaagtgaataaacgtctggaatactcgctggtcaaaggcattaccgagtttatcgagcaggataccgaagaagcccgccagcaggctacgcgcccgattgaagtgattgaaggcccgttgatggacggcatgaatgtggtcggcgacctgtttggcgaagggaaaatgttcctgccacaggtggtcaaatcggcgcgcgtcatgaaacaggcggtggcctacctcgaaccgtttattgaagccagcaaagagcagggcaaaaccaacggcaagatggtgatcgccaccgtgaagggcgacgtccacgacatcggtaaaaatatcgttggtgtggtgctgcaatgtaacaactacgaaattgtcgatctcggcgttatggtgcctgcggaaaaaattctccgtaccgctaaagaagtgaatgctgatctgattggcctttcggggcttatcacgccgtcgctggacgagatggttaacgtggcgaaagagatggagcgtcagggcttcactattccgttactgattggcggcgcgacgacctcaaaagcgcacacggcggtgaaaatcgagcagaactacagcggcccgacggtgtatgtgcagaatgcctcgcgtaccgttggtgtggtggcggcgctgctttccgatacccagcgtgatgattttgtcgctcgtacccgcaaggagtacgaaaccgtacgtattcagcacgggcgcaagaaaccgcgcacaccaccggtcacgctggaagcggcgcgcgataacgatttcgcttttgactggcaggcttacacgccgccggtggcgcaccgtctcggcgtgcaggaagtcgaagccagcatcgaaacgctgcgtaattacatcgactggacaccgttctttatgacctggtcgctggccgggaagtatccgcgcattctggaagatgaagtggtgggcgttgaggcgcagcggctgtttaaagacgccaacgacatgctggataaattaagcgccgagaaaacgctgaatccgcgtggcgtggtgggcctgttcccggcaaaccgtgtgggcgatgacattgaaatctaccgtgacgaaacgcgtacccatgtgatcaacgtcagccaccatctgcgtcaacagaccgaaaaaacaggcttcgctaactactgtctcgctgacttcgttgcgccgaagctttctggtaaagcagattacatcggcgcatttgccgtgactggcgggctggaagaggacgcactggctgatgcctttgaagcgcagcacgatgattacaacaaaatcatggtgaaagcgcttgccgaccgtttagccgaagcctttgcggagtatctccatgagcgtgtgcgtaaagtctactggggctatgcgccgaacgagaacctcagcaacgaagagctgatccgcgaaaactaccagggcatccgtccggcaccgggctatccggcctgcccggaacatacggaaaaagccaccatctgggagctgctggaagtggaaaaacacactggcatgaaactcacagaatctttcgccatgtggcccggtgcatcggtttcgggttggtacttcagccacccggacagcaagtactacgctgtagcacaaattcagcgcgatcaggttgaagattatgcccgccgtaaaggtatgagcgttaccgaagttgagcgctggctggcaccgaatctggggtatgacgcggactgattcacaaatctgtcacttttccttacaacaaacagggcgctcaatgagtgccctgtctctttattaatatgaaacacttatactggaaacaggctggaataatcttagccggaaaaacgaatgtcaaaaggcacagtaaagatgccagtcagcgtgtttccggtcctttggtcattcaattgcttcaggaacatataacgataaggagaacctgaactcgtgttaacgctgcttcacctgctttctgccgtcgccctgctggtctgggggactcatattgttcgaaccggcgtaatgcgcgtcttcggcgcgcgtttgcgtactgtccttagccggagcgtcgaaaaaaagccgctcgccttttgcgcggggatcggcgttaccgcactggtacagagcagtaatgccaccaccatgctggtgacctcgtttgtcgctcaggatctggtagccctcgcaccggctctggtcattgtgctgggtgcagatgtcgggacggcgctaatggcgcgtattctcaccttcgacttatcctggctgtcaccgttacttatttttatcggcgtgatttttttcctcggacgcaaacagtcacgcgccgggcaactgggccgcgtcggtattggtcttgggctgattttgctagcgctggagttgattgtgcaggccgtaacgccgatcacccaggcaaacggcgttcaggtgatctttgcctcgctgaccggcgatattctgctggatgcgctgattggcgcgatgttcgccattatcagctactccagccttgctgctgtactgctgaccgcgactctgaccgccgcaggcattatctccttccccgtggcgctctgtctggtgattggtgctaacctcggttccggtctgctggcaatgctcaacaacagtgccgccaatgccgcagcccgccgtgtcgcgctgggtagtctgctgtttaagctggtgggtagcctgattatcctgccgtttgtccatttgctggcagagacaatggggaagttgtcattgccaaaagcggaactggtgatctatttccacgtcttctacaaccttgtacgttgcctggtcatgctgccatttgttgacccgatggcacggttttgcaaaacgattattcgcgatgaaccggaactggatacccagctacggcctaaacatctggatgtcagcgcgctggatacgcccacgcttgctctggcgaacgccgcgcgcgaaaccctgcgcattggcgacgccatggaacagatgatggaagggttgaataaagtgatgcacggtgagccacggcaggagaaagagctgcgtaagctggcagatgatatcaacgttctctacaccgccattaagctgtatctggcgcggatgccaaaagaagagctggcggaggaagagtcgcgccgctgggcagagatcatcgaaatgtcgctcaaccttgaacaggcctccgatatcgtcgagcgcatgggcagcgaaattgctgacaaatcactggcagcacggcgggcattttcgcttgatgggttgaaggaactggatgcgctctatgagcaattgctcagtaatttaaagctggcaatgtcggtgttcttctctggcgatgtcaccagcgctcgtcgtttgcgtcgcagcaaacatcgttttcgcattcttaatcgccgctattcccacgcccacgtcgatcgcctgcatcagcaaaacgtgcagagcattgaaaccagttcgctacatttaggcttactgggagatatgcagcgcctgaactcgctgttttgttcggtggcttacagtgtgctggaacagccggatgaagatgaaggacgggacgagtattaatattgtgaatcctgtaggcctgataagacgcgtcaagcgtcgcatcaggcactatgaacaagatgccggatcatgcatccggcaattcacttaaaaacggtgaccagcttccagcggaaccgcttcttcaccagccttaaacacataagtggtgttcgggccacccagcgtagcgtgacctttactcactgtgatccagttaccttccggtagaccaataatcgtcagttctggcgcgacgaccagcagttcgcgaatacgctgctcacgggtttcacctttatggccttccggcagcgcgttggtgaagtgcgggttgatttgcagcgggaacagatttagcgcatcgaaaccttgcggatcgacaatcggcatatcgttggtggtacgaatagttgggcaagcaaggttagcgcctgcgctccagccaatatacagagcgccacgtttaaccacgtcagtaattggtgccagcagcccgcgctcgcggcactgtttcagcaactggaaagtattcccgccgccgacaatcacgatctcagcattttcaatcgcggcaacgggatcgacaacgctatgaataccggtgacagaaacacccagcggagcgagaaccgcagccgttttcgctgtgtaatcatcccaggtctgcgttacgccagcgaaagggataaacaccgctgagcggcgaccctgcaactgttcagcaattagcggcagtgcatgttccagccaggctttacccggcagcgtcgagttactcaataaaagcagttccattacttctccggttagtaagaaatcacgggaggcatgctaccactgcgaatttaaccacttactgacatggctcacgatgtcgcacattgcttctggaaagtgatttgagcaggtaacgaattcaagccaatggaaataacaaatagttcgctcatgactattttttatcaacccaaaggtacggtatattccgttttttacaggagaatttatgctgcccgactcatcagtccgtttaaataaatacatcagcgaaagcggaatttgctcacgccgcgaagcggatcgctatatcgagcaaggcaatgtgttccttaatggcaagcgagccaccattggcgatcaggtgaaacccggcgacgttgtgaaagtaaacggtcagttgattgaacctcgggaagccgaagatttggtacttatcgccctgaacaagcccgttggtattgtaagcaccaccgaagatggcgagcgcgataacattgtcgatttcgttaaccacagcaaacgcgtgttcccgattggccgcctggataaagactcccaggggctgattttcctcaccaatcacggcgatctggtgaataagatcctgcgtgctggcaatgatcatgagaaagagtatctggtgacggtcgataaaccgattaccgaggagtttattcgcggcatgagtgcgggggtgccaatcctcgggacagtgaccaaaaagtgcaaagttaaaaaagaagcgccgtttgtcttccgcattaccctggtgcaggggctgaaccgtcagatccggcgcatgtgcgagcatttcggctatgaagtgaaaaagctggaacgcacgcgcatcatgaacgttagcttaagcggcattccgctgggggaatggcgcgatttaaccgacgatgagttaatcgacctctttaagctcattgaaaattcctcttccgaggtaaaacctaaagcgaaggccaaaccgaaaacagcgggcatcaaacgtccagtcgttaagatggaaaaaacggcggaaaaaggcggtcgcccggcgtccaacggtaagcgttttacctcgccggggcgtaaaaagaaggggcgctgattaacgcctcagactgatgaaaacggcccaaaagtgcccggacagtcccctcgccccttcgggaaaagggttagggtgaggggaaaattgtgttcacactgacgagtgaaaatctcaggcgttgattgtggattagcgcctgccgcgcgtcgacgtatttgctgaccagctaaatgacgcttcaggatccggtttataagcctgctttttcttcaactggcgggcttttttcgcttcagcctcacgctcaaccattaatttatcgatgtaatctttcttaatgctgttggtttcggagttggtcaatacgcgaccatgcgcaatccgcgcccgatccagcagtgttttaagttcacgctgctcgcgttcagtcatctctttttgggtaatacgggggagtgccatgatggtgccctcagtgagccagagagttcagtgtacgggaattcgtttgcgagcagaactgataatattcattttgccttctcttaactatttatctctttcgataattaattagagatgcagataaaaaaattaaaggcaattattctccgataaagacgctggttaacagagtacaggctcgtttattgatgagcatagtgacaagaaaatcaatacggcccgaaatatagcttccaggccatacagtatttactcaaacaaattactatgcagtttttgcaccacctgctcggcatcttcgccgggcaccaggaagcacaggttatggctggatgcgccataacaaatcatgcgaatgttgaacggttccagtacgccgaatacctctttgccaacgccgcaggcttttgacaggtcattgccaatcaacgcgaccagcgccagaccttcttccacctccacccgacacagtgcggaaagctccatcagcagagattgcgtcagcaacgtatcgccagtggaggttgaaccggtggtatcaagggttaatgccacgctcacttctgacgtggtgattaagtctaccgaaatattatgccgcgcgaggatgccgaaaacttccgcgaggaaaccgcgagaatgcagcatattcaggctgtgcaaagtgagcagagtctgattgcgacgaagcgccagagcgcggaacagcggcggattttcagttttattgcacaccagcgtaccacctgcgcgtgggtctttgctggagccgacaaagaccgggatatcgctgcgtactgcgggtagcaacgttgccggatgcagtacttttgcaccaaaagttgccatctctgccgcttcggcaaacgcgatttcatcaatgcgttttgctgcggaaactacgcgtggatcggtggtgtagatgcccgggacgtcggtccagatatcaacacgagatgcgtgtaaagcctccgccagcaaggctgccgtataatcgctgcctccacggccaagcgtcgttgtacgacctttattttcgctaccgataaatccctgggtgatcactaagccttcattgagacgtgggagcagctgcagcgcggccagttccgccagcgcggctatatctggctctgcacgaccaaatcggtcgttggtacgcatcactttacgtacatcaaaccactgtgcctgaacatcgcgttcgcgcaggatctcaacaaacagcagggtcgacatcagctcgccgtggctgaccagctcatctgtcagcgccggagacgttgccagcgccgccgcttctgccagaacagtaatgttctccagcagacgttcaatctcttcacggataacgttcgggtaacgcagacgttccagaatggcaaactggatgttgcggatagcgtcgagtttttcgaatcgctcgccaggttccagtccttcagctaaagcgaccagcagattagtgataccagcagaagccgagaggacaactaaacgcacgttggcatcagaaagcacaatatcagcgctgcggttcatggcgtcaaaatcagctacgctggtaccgccaaatttggagacaacaatttcagacataactacctcgtgtcaggggatccattttcagccttggcacaagggaagagcggaagacgggtgggcgcagagcgatacttcgctactattttcacccagaagtgctccaccacttgcgaaacgcccgactgcgaacgcttctggtgacaacccaggggattcagcccctgtagccgatgatgaacgtggccagccgttcaatcacctcggcgatgcaccccctcaggtgttatcacaggactggctcctccaacaccgttacttgggcaacgcgcctcttctggcctgcgctagcgcaggtagtacatttataaataaagggtgagcggggcggttgtcaacgatggggtcatgcggatttttcatccactcctggcggtcagtagttcagctaataaatgcttcactgcgctaagggtttacactcaacattacgctaacggcactaaaaccatcacatttttctgtgactggcgctacaatcttccaaagtcacaattctcaaaatcagaagagtattgctaatgaaaaacatcaatccaacgcagaccgctgcctggcaggcactacagaaacacttcgatgaaatgaaagacgttacgatcgccgatctttttgctaaagacggcgatcgtttttctaagttctccgcaaccttcgacgatcagatgctggtggattactccaaaaaccgcatcactgaagagacgctggcgaaattacaggatctggcgaaagagtgcgatctggcgggcgcgattaagtcgatgttctctggcgagaagatcaaccgcactgaaaaccgcgccgtgctgcacgtagcgctgcgtaaccgtagcaataccccgattttggttgatggcaaagacgtaatgccggaagtcaacgcggtgctggagaagatgaaaaccttctcagaagcgattatttccggtgagtggaaaggttataccggcaaagcaatcactgacgtagtgaacatcgggatcggcggttctgacctcggcccatacatggtgaccgaagctctgcgtccgtacaaaaaccacctgaacatgcactttgtttctaacgtcgatgggactcacatcgcggaagtgctgaaaaaagtaaacccggaaaccacgctgttcttggtagcatctaaaaccttcaccactcaggaaactatgaccaacgcccatagcgcgcgtgactggttcctgaaagcggcaggtgatgaaaaacacgttgcaaaacactttgcggcgctttccaccaatgccaaagccgttggcgagtttggtattgatactgccaacatgttcgagttctgggactgggttggcggccgttactctttgtggtcagcgattggcctgtcgattgttctctccatcggctttgataacttcgttgaactgctttccggcgcacacgcgatggacaagcatttctccaccacgcctgccgagaaaaacctgcctgtactgctggcgctgattggcatctggtacaacaatttctttggtgcggaaactgaagcgattctgccgtatgaccagtatatgcaccgtttcgcggcgtacttccagcagggcaatatggagtccaacggtaagtatgttgaccgtaacggtaacgttgtggattaccagactggcccgattatctggggtgaaccaggcactaacggtcagcacgcgttctaccagctgatccaccagggaaccaaaatggtaccgtgcgatttcatcgctccggctatcacccataacccgctctctgatcatcaccagaaactgctgtctaacttcttcgcccagaccgaagcgctggcgtttggtaaatcccgcgaagtggttgagcaggaatatcgtgatcagggtaaagatccggcaacgcttgactacgtggtgccgttcaaagtattcgaaggtaaccgcccgaccaactccatcctgctgcgtgaaatcactccgttcagcctgggtgcgttgattgcgctgtatgagcacaaaatctttactcagggcgtgatcctgaacatcttcaccttcgaccagtggggcgtggaactgggtaaacagctggcgaaccgtattctgccagagctgaaagatgataaagaaatcagcagccacgatagctcgaccaatggtctgattaaccgctataaagcgtggcgcggttaatcatcgtcgatatgtaggccggataaggcgttcacgccgcatccggcaaccgatgcctgatgcgacgcggtcgcgtcttatcaggcctacaggtcgatgccgatatgtacatcgtattcggcaattaatacatagcacgattgattaaataaccttaataacaatgccgacgttatgtcggcatttttttatcagataaatccccttgtctgtaatttaacggaaatcataccgtgaggttaatcctaaaatagatttttaatcgttgtttatttcggaaaatacgcagattaattgcttttgtttttattttaagtttatgatttttattgttatttaaatataagttgaaacttatatttgatattcattccaattatcctaaaacgccatcgctaattccccgcgccgtaattcgcatgctttagttgtgtatactcgatcccgcccgaaatgtttttgggtaaatctccattcattcaatgaagggaaattgttatgaaaaaagttctgtatggcatttttgccatatctgcgcttgcggcgacttctgcgtgggctgcacctgtacaggtgggcgaagcggcagggtcggcagcaacgtcggtttcggcggggagttcctccgcgaccagcgtcagcaccgtaagctcggcggtgggtgtcgcgcttgcggcaaccggtggcggtgatggttctaataccgggaccaccacaaccacgaccaccagtacccagtaataaagtatgtatccccaaaataattcgagtcattgcatctgtggctagaagtatgaagggattaaccataaccacactccggtgtggttattctgcccctctggagaagagtcgtgaagcgacctgcactcattcttatctgcctgttattacaggcctgttcagccacgactaaagagctgggcaattcactgtgggacagtctgttcggcacgccaggcgtacagctgacggatgatgatattcaaaatatgccctacgccagccagtacatgcagcttaatggcgggccgcagttatttgtggtgctggccttcgctgaagacggacaacaaaaatgggtcactcaggatcaggctactctcgttacccaacatggccgtctggtgaagactctgctcggcggcgacaacctgattgaagtgaataaccttgctgccgacccgctgattaaacccgcacaaatcgttgatggcgcaagctggacgcgcacgatgggctggaccgagtaccagcaggtacgctacgccaccgcacgctcagtcttcaaatgggatggcaccgataccgtcaaagtcggcagcgatgaaaccccggttcgcgtgctggacgaagaagtctccaccgaccaggcgcgctggcataaccgctattggatcgacagcgaagggcaaattcgccagtcggaacagtatctcggcgcggattattttccggtgaaaaccactctcatcaaggcggcaaaacaatgattaaacaaactattgtcgcgttgcttttgagtgtgggagcgtcatcggtcttcgcggcaggaaccgtcaaggtgttcagcaatggcagcagtgaggccaaaacgctaacgggcgcagagcatttaatcgatctggtaggccaaccgcggctggcaaacagctggtggcccggtgcggtgattagcgaagagctggcaacggcggcagcattgcgtcagcagcaggcgttgctgacacggctggcagaacagggcgcagattccagcgccgacgatgccgctgcgattaacgccttacgccagcaaattcaggcgttgaaagtgacgggcaggcaaaaaatcaatcttgatcccgatatcgtccgcgttgccgaacgcggtaacccgccgttgcagggcaactacacgctgtgggtcggaccaccgccgtccacggtcacgttgttcgggcttatcagccgtcctggcaagcagccattcactccaggtcgcgacgtggcgagctatctctctgaccagagcctgctcagcggtgcggatcgcagctacgcgtgggtggtttacccggacggacgcacgcaaaaagcgccggtggcttactggaacaagcgtcacgtagagccgatgcccggcagcattatttatgttggcctcgcggactccgtctggagtgagacgcctgatgcccttaacgccgacattcttcagactctgacgcagcggatacctcaataatgaaaaaaagacatctgcttagcttactggcgctgggcattagcacagcttgctacggcgaaacatatcctgcgcccattggtccgtcgcagtcggatttcggtggcgtaggattattacaaacgcccaccgcgcgtatggcacgggaaggggagttgagtctgaactatcgcgataacgatcagtaccgttattactcagcttcagtgcaactcttcccgtggctggaaacaacgctgcgctacaccgacgtgcgcacccggcagtacagcagcgtcgaagcgttctctggcgatcaaacgtataaagataaagccttcgatctcaaactgcgtttgtgggaagagagttactggctgccgcaagtggcggttggtgcgcgggatatcggcggtacggggctgtttgatgcggaatatcttgttgccagcaaagcctgggggccgttcgattttacgctcggcctgggctgggggtatttgggcaccagcggtaatgtgaaaaatccgctctgttcagccagtgataaatattgctatcgcgataacagctacaaacaggcgggatctatcgacggtagccagatgttccacggtcctgcctcactgtttggcggcgtggaataccagacgccctggcaaccgctgcgcctgaaactggagtatgaaggcaataattatcagcaggattttgccgggaagctggagcaaaaaagtaagtttaacgtcggtgcgatttatcgcgttaccgattgggccgacgttaaccttagctatgaacgtggcaacacctttatgtttggcgttacgttgcgcaccaactttaacgatctgcgcccgtcttacaacgataacgcccgcccgcaatatcaaccgcagccgcaggatgccattttgcagcattcggtggtggcgaatcagttaacgctgttgaaatacaatgccggacttgccgatccacagatccaggcgaaaggcgatacgctgtatgttaccggcgagcaggtgaaatatcgtgattcgcgcgaagggatcatccgtgcgaatcggatcgtgatgaacgatctgccggatgggatcaaaacgatccgcattacggaaaatcgccttaacatgccgcaggtgacgacggaaaccgatgtcgccagcctgaaaaatcatctcgccggagagccgttgggccacgaaacgacgctggcgcaaaaacgcgtcgagccagtggttccgcagtccaccgagcagggctggtatatcgacaaatcacgctttgatttccatatcgatccggtgctgaaccagtcggtcggtggcccggaaaacttttacatgtatcagctgggcgtgatgggaacggcagatttgtggctgacggaccatctgctgaccaccggcagcctgtttgcaaatcttgccaacaactacgacaagtttaactacactaatcctccgcaggactcgcacttaccgcgcgtgcgtacccatgtgcgcgagtatgtgcagaacgatgtctatgtgaataacctgcaagccaactacttccagcatctgggcaacggcttctacggtcaggtctacggtggttatctcgaaaccatgtttggcggtgcgggggcagaagtgttgtatcgcccgctggacagcaactgggcgtttggtctggatgccaactacgttaaacagcgcgactggcgtagtgcaaaagatatgatgaaattcaccgactacagcgtgaaaaccggacatctgaccgcctactggacgccatctttcgctcaggatgtgttagttaaagccagcgtcgggcagtatctggcaggggataaaggcggcacgctggagatcgccaaacgctttgatagcggcgtggtggtgggtggctatgccacgatcactaatgtttcgaaagaggagtacggcgaaggggacttcaccaaaggcgtgtatgtctcggtaccgttggatctcttctcgtctggcccgacacgcagccgtgcggcgattggctggacgccgctgacgcgtgacggtggtcagcaacttgggcgtaagttccagttgtatgacatgaccagcgaccgtagcgtcaatttccgctaagtcatgggaaaggtgccagttttcgcactcactggcaccttcattcttaatggcctgtcgagccatcaggaacgcagttcactcccggtttgcgatctggtgtgtaaaggcgaaaacattctgtcttcctgtccgtcgatatcggttgcaggtctggttgcctgagcgactgggccatcattgggctggagacattgctttgcggtaggtcggctttatcagcagtaccgagcggaccagcataagcaggaagaacagagactgataacatcaaagcagcaaaataaggcttcatttttaccacctttatcaggttacgtttcatttgttccagaggaacattgtcgatttttcgcgcattgctggtggctgggaatcacctgaatgggtgatttttgaattaccggctttggtgcggtttgtcttgccggatgcgccgccaggcgcggcttatccggcctacgggtaggtatatccggctttggtggaggcgcgctccaaatccaggttgaacaaaacatacacaaaaaatatagatctccgtcacatttttgcgttatacaggaagctcgccactgtgaaggaggtactgctatgacgtcactctctcgtccgcgcgtggagtttatctccaccattttgcagaccgtactcaatcttggcctgctgtgcctcggcctgattttggttgtcttcctcggcaaagaaacggtgcatctggctgatgtgctgttcgcgccagaacaaaccagcaaatatgagctggtagaaggactggtggtttactttctctatttcgaatttatcgcgctgattgtgaagtactttcagtccggttttcacttcccgctacgttactttgtctatattgggatcaccgccattgtgcgcttgatcatcgtcgatcataaatcgccactggatgtgttgatctactcggctgcgatcctgttactggtgatcaccctgtggctgtgtaattcgaaacggctgaagcgggagtaaaaagtcagcacgccgaaatggcgcggcgtgctggacaggaagattacagcgtagcagtttgttgtgttttcttcgtttccggttcccagagcgcttccagctcctcaagggttttacctttggtttccgggacaaatttccacataaacagtgctgccagaacgcccatacaaccgtaaatccagtaggagaaaccgttgtggaaatgggccaccagccaggagtttttgtccatcatcgggaaggtccaggagacgaagtagttcgccagccactgggccgccaccgcgattgccagcgctttaccacgaatagcattcgggaagatttccgacagcagtacccagcataccggaccccaggacatggcaaaggcggcaacatagaacagcatcgacagtagcgccacaatacccggtgcctgagtgtaaaacgcggtaccgaggctaaacataccgattgccattccgagtgcgccgataatttgcagtggcttacgaccaaatttatccaccgtcataattgccagaacggtgaaggtgaggttgataactccgacaataatggtctgcaacagcgcgatatccgtgctggcccccagcgttttgaacacttccggcgcgtagtacagcaccacattgatgccgacaaattgctggaagatggagagcattacgccgattacaatcacgcccacgccaaacatcagcagacgaccaccggttttgcggccatgatccagggagtgtttaatttcctgtactgcctgagttgcaagcgtgttgcccataattttgcgcaggataccttccgcctgttcttgcttgccgcgcgacatcagccagcgaggactttctggcacggtatacagcagcattaagaacagcagtgcagggatacattccgaggcaaacatataacgccagccgtcagtattcagccagctggcatcaccggaacgggcaataaaatagtttacgcagtaaactaaaagttgcccgaaaataatcgcaaactggttaaaagagaccagtttcccgcgaatatgagctggagccagttccgcaatatacattggcgagagcattgaggctaaaccaacgccaataccgccaataatgcgataaataacaaattccgggacataacctgccagataaacaggcacagtgttgtccgggtttatagaggtaaaaccaagttctggccaggcagaacctacaccagaaataaaaaacaggacagcagcaatcttaagtgaatcacgacgaccgaagcggttactgcaataaccaccgagggcaccgccgatgatgcaaccaatcagagcgctggccacgcaaaaccctaacagggagttggcagcggattcacttaagttttgtggagcaacaaagacggtattgagtgactcaacagtaccggaaataacggcggtgtcgtagccaaataataaaccacctaatgtagcgactaaggtaatcgaaaatatataactggaattatactgggtattcattcagacctgccttagaccattctgatcttttatcagtgcattgatgttggaattgtcaggcagttaaggcaattatcattttttacaatgcgtttacgtaatgtcttttctgtgatcttaattgtgataattatccaaaattgataaaaacaatactattgccgtgactcagagcacgaaagagaattatcgtaagtgggaaaacaaataacgtaaaaataataagctctatgatggaaatattaaccggcgaacgattcagattgcagacgaaagaaaaaaaggcgctccgtggagcgccgaataacagtcacaagttgggataacgtaagttgagggtgcagcggcataacattggcagaacaacatctttaacctttcacaccacctgccgtcaggccgttgaccagccagcgttgagccagcaagaagacgatggtgatcggtaatgcagacatcacggcagcggcggcaaagtcaccccacaggtagttttgcgggttgaggtattgctgcatccccacggccagggtgtagctgtttacgtcacgcagtaacagcgacgcgaccggaacttcagtaatggcagcgataaacgacaggatgaataccaccgccagaatcggtactgacagcggcaacaggacaaggcggaaggcctgccacggtgtcgcaccatccagcgcagcagcttcttccagcgaactgtcgatggtttcgaaatagcctttgatggtccagacatgcagcgcaatcccacccagatacgcgaaaattacgccgccgtgagtattcaggccaatgaatggaatgtactcacccagacgatcaaacaacgcatacaacgcgaccagtgaaagtactgccgggaacatctggaaaatcagcattcctttcagcagcgtcgctttgcctggaaagcgcatacgggcgaaagcgtaggcgcaggtggtggagagcgccacaatgccaatcgcggaaatcccggcgacctttaccgagttccacagccacagcagtaccgggaatggcggtggcgtaatgcgaccatcagcctgttcaacgctaaaacctaacgccagtttccagtgatcccaggagatttgctccgggatcaggctgccggtcgcaaagtttccctgacgcagcgagatagcgacgaccatcagcagcgggaacataatcgctgcgataaaaagtagcagtagcaggtgagtaataaataaacgagctttttgcgatttcggttggaccattgccatttttgttatctcccttaatcaaacttcattcgcgtggctttcaggttcactatcgccagcgcacccaccagcaggaagatcagcgtggcaattgctgccgccagaccgaagtcctgacccccgccgccttcaaaagcgatgcggtaggtgtagttaacaagcaggtcggtataaccggctggcgtggtcgtgccaagacgatccgggccgccgttggttaacagttgaatcagcacgaagttgttaaagttaaaggcgaagctggcgatcatcagcggcgtcagcggtttaatcagcagcggcagcgtaatcttaaagaagttctggaacggacctgcgccatccattgctgaggcttcatacaaatcgtccggaatcgctttcagcaagcccatgcagaggatcatcatgtacggataacccagccaggtattgacgataattagcatcgtgcgggcggtggtcggatcgctgaaccaggcgggcttcacgccaaacagcgcgctcaacatcatgttgatttcaccgaagctctggttaaacaaccctttgaaaatcaagattgaaatgaacgatggcaccgcgtagggcagaatcagcaggacgcgatagaccgctttgccgcgcaacgcttcccactgcaccagacacgccagaaccatgccgaccgccaccgttaaaaagacagtgatcagcgagaacaccacggtccagacgaaaatggcgaggaacggtttctgaatgccttcgtcggtaaagacgcgggtaaagtttttccagccggtggtcacggtgtaaccggggcttagcttttcatcaccccagttgccgtcggcggtaatggactggtaaaagccaatttggttattcggacgatatttcacgccgctctgattattcgtcaacgtgccgtcaccgtcgagtgtgtagagcggctgcgtgccagaaaactggcgcagggagctcatcatcactttgttgccatccggcagaatggcggtaatgtcactcagcgcctgacgattctgggtaatcacgcgcagattcgcgcgttcgccttcgggctgggcggtcgtttctttcagttgcagtttttgctcgccgccaaatttaaaagcgtcggagaggtaatttttgccggtttcgccgtcgctgagcgccagttgccactcatcgcccgccgggtaaagaccaaagttataggttttgcctgcttgccaggagcgatctaacaacacttcctgcgcacgttcaaaagtcagctggttagtgctgctgtagttggtgaaggcaatggcgatggtgcagaccagagggaagaggacgaataatcccattccagccattcccgggtaaacatagcgccaggcgtaggctttacgattggcgaaaatatacagccccgctgaactcaatatcagcgtggtaatggcgaacaggtattccccttgtgcgtacattaaaacaacaaggtaacccaccagcaggccgagcagacctagcactgaccatttcagcgcgtcgctttgccaccaatgtttctttttaatgacatccatggggttcttcctcattccaggacggataaggctttcacgccttatccgacaacaactgcctgatgcgacgctgacgcgtcttatcaggcctacatacgtttcggttttgtaggccggacaaggcgttcacgccgcatccggcatttcacagcattacttggtgatacgagtctgcgcgtctttcagggcttcatcgacagtctgacgaccgctggcggcgttgatcaccgcagtacgcacggcataccagaaagcggacatctgcgggatgttcggcatgatttcacctttctgggcgttttccatggtggcggcaatacgtggatctttcgccaactcttcctcgtaagacttcagcgctacggcacccagcggtttgtctttattaaccgcttccagaccttcatcagtcagcagatagttttcgaggaactctttcgccagctctttgttcggactggcggcgttaatacctgcgctcagcacgccaacgaacggtttggatggttgacccttgaaggtcggcagtaccgttacaccataattcactttgctggtgtcgatgttggaccatgcccacgggccgttgatggtcatcgctgtttcgcctttattaaaggcagcttctgcgatggagtaatcggtgtctgcattcatgtgtttgtttttaatcaggtcaaccaggaaggtcagacccgctttcgcgccagcgttatccacgcccacgtctttaatgtcgtacttgccgttttcatacttgaacgcataacccccgtcagcagcaatcagcggccaggtgaagtacggttcttgcaggttgaacatcagcgcgctcttacctttcgctttcagttctttatccagcgccgggatctcttcccaggtttttggcgggttcggcagcagatctttgttataaatcagcgataacgcttcaacagcgatcgggtaagcaatcagcttgccgttgtaacgtacggcatcccaggtaaacggatacagcttgtcctggaacgctttgtccggggtgatttcagccaacaggccagattgagcgtagccaccaaagcggtcgtgtgcccagaagataatgtcagggccatcgccagttgccgcaacctgtgggaatttctcttccagtttatccggatgctcaacggtgactttaattccggtatctttctcgaatttcttaccgacttcagcgagaccgttatagcctttatcgccgttaatccagattaccagtttaccttcttcgattttggcgagagccgaggcggaaaacatcatcgtcgttaatgcggataatgcgaggatgcgtgcacctgtttttattttcataatctatggtccttgttggtgaagtgctcgtgaaaacacctaaacggactctagtttctttatacggcaacctctttccatcctccttgcccctacgccccaccgtcgctttgtgtgatctctgttacagaattggcggtaatgtggagatgcgcacataaaatcgccacgatttttgcaagcaacatcacgaaattccttacatgacctcggtttagttcacagaagccgtgttctcatcctcccgcctcctcccccataaaaaagccagggggtggaggatttaagccatctcctgatgacgcatagtcagcccatcatgaatgttgctgtcgatgacaggttgttacaaagggagaagggcatggcgagcgtacagctgcaaaatgtaacgaaagcctggggcgaggtcgtggtatcgaaagatatcaatctcgatatccatgaaggtgaattcgtggtgtttgtcggaccgtctggctgcggtaaatcgactttactgcgcatgattgccgggcttgagacgatcaccagcggcgacctgttcatcggtgagaaacggatgaatgacactccgccagcagaacgcggcgttggtatggtgtttcagtcttacgcgctctatccccacctgtcagtagcagaaaacatgtcatttggcctgaaactggctggcgcaaaaaaagaggtgattaaccaacgcgttaaccaggtggcggaagtgctacaactggcgcatttgctggatcgcaaaccgaaagcgctctccggtggtcagcgtcagcgtgtggcgattggccgtacgctggtggccgagccaagcgtatttttgctcgatgaaccgctctccaacctcgatgctgcactgcgtgtgcaaatgcgtatcgaaatctcccgtctgcataaacgcctgggccgcacaatgatttacgtcacccacgatcaggtcgaagcgatgacgctggccgacaaaatcgtggtgctggacgccggtcgcgtggcgcaggttgggaaaccgctggagctgtaccactatccggcagaccgttttgtcgccggatttatcggttcgccaaagatgaacttcctgccggtaaaagtgaccgccaccgcaatcgatcaagtgcaggtggagctgccgatgccaaatcgtcagcaagtctggctgccagttgaaagccgtgatgtccaggttggagccaatatgtcgctgggtattcgcccggaacatctactgccgagtgatatcgctgacgtcatccttgagggtgaagttcaggtcgtcgagcaactcggcaacgaaactcaaatccatatccagatcccttccattcgtcaaaacctggtgtaccgccagaacgacgtggtgttggtagaagaaggtgccacattcgctatcggcctgccgccagagcgttgccatctgttccgtgaggatggcactgcatgtcgtcgactgcataaggagccgggcgtttaagcaccccacaaaacacacaaagcctgtcacaggtgatgtgaaaaaagaaaagcaatgactcaggagatagaatgatgattactctgcgcaaacttcctctggcggttgccgtcgcagcgggcgtaatgtctgctcaggcaatggctgttgatttccacggctatgcacgttccggtattggttggacaggtagcggcggtgaacaacagtgtttccagactaccggtgctcaaagtaaataccgtcttggcaacgaatgtgaaacttatgctgaattaaaattgggtcaggaagtgtggaaagagggcgataagagcttctatttcgacactaacgtggcctattccgtcgcacaacagaatgactgggaagctaccgatccggccttccgtgaagcaaacgtgcagggtaaaaacctgatcgaatggctgccaggctccaccatctgggcaggtaagcgcttctaccaacgtcatgacgttcatatgatcgacttctactactgggatatttctggtcctggtgccggtctggaaaacatcgatgttggcttcggtaaactctctctggcagcaacccgctcctctgaagctggtggttcttcctctttcgccagcaacaatatttatgactataccaacgaaaccgcgaacgacgttttcgatgtgcgtttagcgcagatggaaatcaacccgggcggcacattagaactgggtgtcgactacggtcgtgccaacttgcgtgataactatcgtctggttgatggcgcatcgaaagacggctggttattcactgctgaacatactcagagtgtcctgaagggctttaacaagtttgttgttcagtacgctactgactcgatgacctcgcagggtaaagggctgtcgcagggttctggcgttgcatttgataacgaaaaatttgcctacaatatcaacaacaacggtcacatgctgcgtatcctcgaccacggtgcgatctccatgggcgacaactgggacatgatgtacgtgggtatgtaccaggatatcaactgggataacgacaacggcaccaagtggtggaccgtcggtattcgcccgatgtacaagtggacgccaatcatgagcaccgtgatggaaatcggctacgacaacgtcgaatcccagcgcaccggcgacaagaacaatcagtacaaaattaccctcgcacaacaatggcaggctggcgacagcatctggtcacgcccggctattcgtgtcttcgcaacctacgccaagtgggatgagaaatggggttacgactacaccggtaacgctgataacaacgcgaacttcggcaaagccgttcctgctgatttcaacggcggcagcttcggtcgtggcgacagcgacgagtggaccttcggtgcccagatggaaatctggtggtaatagcaaaacctgggccggataaggcgtttacgccgcattcggcaaccaacgcctgatgcgacgcttgcgcgtcttatcaggcctacaacggctgtcaaatgtaggccggataaggcgtttacgccgcatccggcataaaaacaggttgtcattatctgaaaggggcgaaagcccctctgattatcgggtttagcgcgctattgcctggctaccgctgagctccagattttgaggtgaaaacaatgaaaatgaataaaagtctcatcgtcctctgtttatcagcagggttactggcaagcgcgcctggaattagccttgccgatgttaactacgtaccgcaaaacaccagcgacgcgccagccattccatctgctgcgctgcaacaactcacctggacaccggtcgatcaatctaaaacccagaccacccaactggcgaccggcggccaacaactgaacgttcccggcatcagtggtccggttgctgcgtacagcgtcccggcaaacattggcgaactgaccctgacgctgaccagcgaagtgaacaaacaaaccagcgtttttgcgccgaacgtgctgattcttgatcagaacatgaccccatcagccttcttccccagcagttatttcacctaccaggaaccaggcgtgatgagtgcagatcggctggaaggcgttatgcgcctgacaccggcgttggggcagcaaaaactttatgttctggtctttaccacggaaaaagatctccagcagacgacccaactgctcgacccggctaaagcctatgccaagggcgtcggtaactcgatcccggatatccccgatccggttgctcgtcataccaccgatggcttactgaaactgaaagtgaaaacgaactccagctccagcgtgttggtaggacctttatttggttcttccgctccagctccggttacggtaggtaacacggcggcaccagctgtggctgcacccgctccggcaccggtgaagaaaagcgagccgatgctcaacgacacggaaagttattttaataccgcgatcaaaaacgctgtcgcgaaaggtgatgttgataaggcgttaaaactgcttgatgaagctgaacgcctgggatcgacatctgcccgttccacctttatcagcagtgtaaaaggcaaggggtaattacgccccacagtgctgattttgcaacaactggtgcgtctcctggcgcacctttttttatgcttccttcctgggatatgagcgattttttatagtaactcacttcttcttcactaagaatatccattatctcaatgccttatcagagattcttttcctttcgccggtagtgtctggacattcaggctacttttccaggttattttatttctgttatgcagaggttttatgataagtcatatcctaaattctggcggcaataactctttgatgaaacatgatgtggtgcaaggaaataatatagtagatcttgatttactacgtaatttaaatggggtgccaggtttaaacagagataactttatttatatcagcaatattttttcaaatataaaacaacggaacgaaaaaatcatgcaataaatatgtttcgtgaagtctcaatcagtaatgatactataagtgtaaaattctacagaaatgaaaaaaattgaatgcgcttgcaattttctgatggataaagatgcgcaggggtatatcgacctgtctgatttggatttaacaagttgtcattttaaaggtgacgttatatcgaaggtgtcttttttatcatcaaatctacaacatgtaacattcgaatgtaaagaaattggggattgcaattttactactgcaatagttgataatgtcatatttagatgtcgacgtttacacaatgtgatttttatcaaagcgagtggtgaatgtgtcgatttcagcaaaaatattcttgatacagttgacttctcgcagagtcaacttggtcatagtaattttcgcgaatgtcagattagaaattcaaacttcgataattgttatctttacgcttcgcacttcaccagagcagagtttctgtctgccaaagaaatatcatttattaaatcgaatttgacagctgttatgtttgattatgtgcgaatgtcgacagggaattttaaagattgcattacagaacaattggaattaactattgattattcagatatattttggaatgaagatctcgatggttatatcaataacattataaaaatgattgatacattgccagataatgcaatgatattgaaatccgttctggccgtaaaactggtgatgcaattaaaaatacttaatattgttaataaaaactttattgagaatatgaagaaaatatttagccattgtccttatataaaagatcccattatacgcagttatatccattctgatgaagataacaagttcgatgattttatgcgtcaacatcgattcagtgaggtgaatttcgatacccaacagatgatcgattttattaacagatttaatacgaataaatggctaattgataaaaataacaatttttttatccaacttatcgatcaggccttacgatcaacggatgatatgatcaaagcaaatgtttggcatctttataaagagtggattcgtagtgatgatgtttcacctatatttatagaaactgaagataatttaagaacctttaacacgaatgaattaacacgaaacgataatatctttatcctgttctcctcagtcgatgatgggccagttatggtggtaagctcccagcgcttacatgatatgttgaatcctacaaaagataccaattggaattccacgtatatctacaaatccagacatgagatgttgcctgttaatcttactcaggaaacacttttcagctccaaatctcatggtaaatatgcgcttttccccatttttactgcgagttggcgagctcatcgtataatgaataagggtgtttaagtaaaggaaaacatcaccgttcctggcatcctggacggtgatgcccctacggttgccctcgccagcacgggcatcggtaaagcgtaaggttcaacatcgttttaccacttcatgcgattgttgcgtttttgttgcgtattagatcacttaatttgctttacatctcccgtaaacacttttctgcgatacaatgcctttacgttatgtaacggagagttcggcatgtcacaccccgcgttaacgcaactgcgtgcgctgcgctattgtaaagagatccctgccctggatccgcaactgctcgactggctgttgctggaggattccatgacaaaacgttttgaacagcagggaaaaacggtaagcgtgacgatgatccgcgaagggtttgtcgagcagaatgaaatccccgaagaactgccgctgctgccgaaagagtctcgttactggttacgtgaaattttgttatgtgccgatggtgaaccgtggcttgccggtcgtaccgtcgttcctgtgtcaacgttaagcgggccggagctggcgttacaaaaattgggtaaaacgccgttaggacgctatctgttcacatcatcgacattaacccgggactttattgagataggccgtgatgccgggctgtgggggcgacgttcccgcctgcgattaagcggtaaaccgctgttgctaacagaactgtttttaccggcgtcaccgttgtactaagaggaaaaaaatatggagtggagtctgacgcagaataagctgctggcgtttcatcgcttaatgcgtacggataagccaattggcgcgttactgctgctctggccaacattatgggcgttgtgggtggcgacaccgggcgttccccagctctggatcctggcggtgtttgtcgcgggtgtctggctgatgcgcgctgccggatgtgtggtgaatgattatgctgaccgcaagtttgatggtcatgttaagcgcacggcgaaccgaccacttcccagcggcgcggtaacagagaaagaggcgcgcgcgctgtttgtcgtgctggtactgatttcgtttttactggtgctgacgctgaatacgatgaccattctgttgtcgattgccgcgctagcgctggcgtgggtgtacccgtttatgaagcggtatacccatctaccgcaagtggtgctgggcgcggcgtttggctggtcgattccaatggcttttgccgctgtgagtgagtcggtgccattgagttgctggttaatgttcctcgccaatattctctgggcggtggcttacgacacgcagtatgcgatggttgaccgcgatgatgatgtgaagattggcattaaatccacggcaatcctgttcggccaatacgataaattgattattggtattttgcagattggcgtactggcactgatggcgatcatcggtgagttaaatggcttaggctggggatattactggtcaattctggtggctggcgcgctgtttgtttatcaacaaaaactgattgccaaccgcgagcgtgaagcctgctttaaagcatttatgaataataactatgttggtctggtactatttttagggctggcaatgagttactggcatttctgatgatgtaaaaaagccggatgatcatccggctttcttctgggttgcctgatgcgcggcgcttctcaggcctacacaacacatcgcaatttattgaatttgcagattatggaaggccggataaggcgttttcgccgcatccggcaattctctctgattacccttcgccctgcgtcgcactctcaatcgtcaaacgcacgtctgatgtaatcaactccgccagcaactgataaaccttcatcgtttctgccggttcggcatcgccgctatcgctgatatacccttcatcacgcagtgtcagcaccagagaactgaacaccgccttgtcgaagaactccggcgcgttgatgccgtgcagcacggagagacgttgcgcgacggtgcggctctctttctccagcgtaccgcggttgatcgacgggttggcactcaacaaccagaaggtgatggcataacgttgcagcgtttcgcgcgcgcctgcggccagcagctgtagcgtgcgagaatgcgccgggttgatatgcaactcatcatcttgcagggtaatcagcccctgacgttgcatctcatttgccagcgcatcaataacgtccggcaactcgtcgcgatcccagcgcaggaacagctccgctttcagcattgggtaaagcacattgacgtgctccatcaatacgtcgcgggagatgtggcgatgctgggtgacgattgccgccatcagcgaaggcagcaccaacatatgcgcaatgttgttgcgatagtaggtcatcagcaccgcttgctcgcgcggcagaatgatgatgtcgccgattgtgtctttctcgacttcaaacttgttcatttgcagcgcgtgatcgataagctcgctggcgctggctgaaggaacggtagagtccgtggagtagggcacgttgcgcatcagatccaggtagcagttgagttgctcggttaactgctcgcgggtgagtgagcgctgacgtgatgccagtagcgcagtacagcacaggttcatggcgtttgccgcgcctgcgttgttaatgcgtaccatcagatcggcagcaatattattgaccgtcggcgttaaccatgccggacgcaccgcttcgatgggatcgatagattcacgccagtcaggtacatgctggttaaggtaggtcatcaacggcattggttcaccgaagttgacgtaaccctgaccgagattacgcagcttgcttaaaccgcgcagcatctgcggcaggctctctttctctttcgtcgcgccgcgcagttctttggcgtaagtacccacttccatgacgtgctcataaccgatatagatcggaatcagcgtaatcggacgcgtgccgccacgcagcatcgcctgaatggtcatcgacagcgtaccagttttcggatccagcaaacgccccgtacgggaacgaccgccttccacgaagtactcgacggaataaccacggctgaacagttcgccgagatactcccggaaaacggtggaataaagtttattgcctttaaacgtacggcgaataaagaacgcccccagacggcggaaaatcggcccggcaggccagaaattcaggttgatcccggcggcgatatgcggcggcaccagcccctggtgatacagcacgtaagaaagcagcaggtagtccatgtgactgcggtggcaaggcacatataccagctcatgaccgtcgtgggccagctggcgaacgcgctcagcgttatggacgttgatgccctggtaaagtcggttccaggtgaagcccagaatacggtcagtcaggcgaatcatctcgtaagagaaattcgccgcaatctcttccatcagtgcaatcgcgttctgctgcgctttttcatgggagatttttttgctgcgcgcttcatcttctaccgctttggcaatggcgcgggaggcgagcagcttattaaacagatcctgacgagcaggcaaacgtgggcctacggcagccagacgttgacgggcaaagtgcatacgcgccacgcgcgccagtttctgagcgatagttttatccgtgccgtgttcatccgccatacggcgcagcgaaactgacggcgagaaacgcacaaaactgtcgcgaccgagccacagtacagcgaaaaatttctgtacgccgttaagcatacgcagcggcgggttcacttcgcctttttcacgccccggcgcgcgaccaaacatcaccgacactggcaccatctgcacatccagatttgggttgctacggtgcaaatcgagatagtcgtggaacagcttaatagactcttctttcggcgtgtaataggtgaacacacgcggcccgccgtgaatgaacacatagcgcggcagtagcgtgccgtcgatttccagcggctctaacgggtcaggcaagtcatgtgccagacactgggcgcgcaacgtcagcaaatctgctttcgagttgtacggtaaaacgtacataattggacgagaggtatccagccccagttccggggcaggatctgccggaatagacttgctttttaccaggatgcttaatggtaaattcagtaatttgtagtaaattcgtggccagccggacataaacgatgtaaagcctctggttaataatgcaaatgcgcggcaaggatagcagaaagtcatgggaaattctgtggtatccgctcatgtttcgcgcggcgctacgcaaacccgaatcatcggatttaacggtacactgatattgacgctcataatgtaaaaaggttctttcaatggccaataataccactggattcacccgaattatcaaagctgctggctattcctggaaaggtttacgcgctgcatggatcaacgaagcggcattccgtcaggaaggcgtagcggtattgttggcggtggtcatcgcctgctggctggatgtggacgcgattacccgcgtgctgcttatcagctccgtgatgctggtgatgattgtggaaatcctcaatagcgccatcgaagcagtggttgaccgaattggctctgaataccatgagctttccggacgcgcaaaagatatgggatccgctgcggtgctgattgccattatcgtcgccgtgattacctggtgcattctgttatggtcgcattttggataacccttccagaattcgataaatctctggtttattgtgcagtttatggttccaaaatcgccttttgctgtatatactcacagcataactgtatatacacccagggggcggaatgaaagcgttaacggccaggcaacaagaggtgtttgatctcatccgtgatcacatcagccagacaggtatgccgccgacgcgtgcggaaatcgcgcagcgtttggggttccgttccccaaacgcggctgaagaacatctgaaggcgctggcacgcaaaggcgttattgaaattgtttccggcgcatcacgcgggattcgtctgttgcaggaagaggaagaagggttgccgctggtaggtcgtgtggctgccggtgaaccacttctggcgcaacagcatattgaaggtcattatcaggtcgatccttccttattcaagccgaatgctgatttcctgctgcgcgtcagcgggatgtcgatgaaagatatcggcattatggatggtgacttgctggcagtgcataaaactcaggatgtacgtaacggtcaggtcgttgtcgcacgtattgatgacgaagttaccgttaagcgcctgaaaaaacagggcaataaagtcgaactgttgccagaaaatagcgagtttaaaccaattgtcgttgaccttcgtcagcagagcttcaccattgaagggctggcggttggggttattcgcaacggcgactggctgtaacatatctctgagaccgcgatgccgcctggcgtcgcggtttgtttttcatctctcttcatcaggcttgtctgcatggcattcctcacttcatctgataaagcactctggcatctcgccttacccatgattttctccaatatcaccgttccgttgctgggactggtcgatacggcggtaattggtcatcttgatagcccggtttatttgggcggcgtggcggttggtgcaacggcgaccagctttctctttatgctgttgctgtttttacgcatgagcaccaccgggctgactgcgcaggcttatggtgccaaaaatcctcaggcattagcccgtacgctggtgcaaccgttgctgttggcgttgggggctggggcgttaattgcgctgctgcgtacgccgattatcgatctggcgctgcatattgttggcggtagtgaggcagtcctggaacaggcgcggcgctttcttgaaatccgctggttaagcgcaccggcgtcgctggcgaatctggtattactcggttggttactcggcgtgcaatatgcccgtgcgccagtaattttgttagtggtcggcaatatcctcaacattgtgctggatgtctggctggtgatggggctgcatatgaacgtgcagggcgcggcgctggcgacggttattgcggaatatgcaacattgctgattggtctgctaatggtgcgtaaaatcctcaaactacgcggaatttccggcgaaatgctgaaaactgcctggcgaggaaacttccgtcgcttgctggcgcttaaccgcgatatcatgctgcgttcgctgttgttgcaactctgtttcggcgcgatcaccgtacttggcgcgcgactggggagtgacattatcgctgttaacgcggttctgatgacgctactcacctttaccgcctatgcgctggatggttttgcctacgcggttgaagcgcactccggtcaggcatacggtgcgcgcgacggtagccagttgctggatgtctggcgggcagcgtgccgccagtcggggatcgtagcgttactgttttcggtggtttatttgctggctggggaacacatcattgcgttactgacgtcgttaacccagattcagcagctggctgaccgctatcttatctggcaggtgattttgccggtggttggcgtctggtgttatctgctggacggcatgtttataggcgcaacgcgtgccaccgaaatgcgtaacagtatggcggtggccgccgcaggttttgcgctgacgctccttacgctgccgtggctgggtaatcatgctttgtggctggcattaaccgtctttctggcgttgcgcgggctttctctggcggctatctggcggcgtcactggcgcaatggtacctggtttgccgcaacgtgacggttaaaaattctgaataaataatcctaagccaaattgctgactacacttaatctcacgttcagaagaaaagtgaacgtactctcattcacaacctaacgatgaggtcttgattatgaataaagatgaagccggcggtaactggaaacagtttaaaggtaaagtgaaagagcaatggggcaaactgaccgatgatgatatgacgatcattgaaggtaaacgtgatcaactggtcggtaaaatccaggaacgttatggttatcagaaagatcaggcagaaaaagaggtcgtggattgggaaacccgcaatgaatatcgctggtaattaatccctcctgcccgacgtgtacaaggatgtacgccctcttaacgcggtttctttttcacctgcacagagtgatcatgctggcactgttcaggatgacgacacgcttccacttctacacatgccgcacagagcccatgtgcttcaatcacattatgccgcagggcaaaccccatttttgccgccagcgtatgcataatgtcttccacgccttctgcacactcttctttcactgcgccgcagcgatcgcaaataaacatggctgacgtatgggtgggctgatcgaacagatgacagagcacataactgttggtggattccaccttatgcacaaaaccttgctcaagcagaaaatccagcgcgcgataaaccgttggcggcttggcttgcggttcagcttcgcgcagtaaatcaagcagatcataagcgctgatagcgccatcctgcagactcatcaggcgcaacacttccaggcgctgtggggtcaggcgcacattacgctgcgcgcagattttttcagcctgcgctaataactcctgcgttgtggtcttttccatcgggcacctcaaagtgggggttaagaatgtccttactttaccatgttccaggaaaaacaccgagaacccttattgttgccgtaatgttgattttctgttttgtaggtaaggtgttatgttgccttgtcgtaccattatcaacacgataataattaataattcatttttaaataaattgcttcaagttaactcgctatttatttaactgggtttaaacgcatacctgtagttcagaaattatgagcgatttttgatagtgaccagatggcaaaagaattataaggaggacacggtacgacaaaaaaggtagatgaatcatgttgaagataatacccggtgcaactggatactttaataaaacactcaattcaaatcaattcgataatgaagatgcaatcaaagataaattagataatagaggttcaatcaaaggtaaattaaataatatatatggtaaatctattgattatgcagcgctgcgtcatcgggatataattattgcaaaaatagatttgtttattcaacgaatcacgcataatttatggcatgcacgtaaaaaaatgtgtttttaattgtgcaaataaatgatctcaaaatgtgggtcaataagtatattgacgattgcactgatgaggatttaaacgatcgtgactttattgcatcagttgttgaccgggctatttttcatttcgcgattaatagtatatgtaatcctggggataataaagatgcaatgcccattgaacaatgtacttttgatgtagaaactaagaatgaccttccctccacggttcagctattttatgaggaatctaaggataatgaacctttagcgaatatacattttcaagcaataggttctggttttttaacgtttgttaatgcctgccaggaacatgatgacaacagcttaaaattatttgcttcgctgttaatttcactttcatattctagtgcctacgcagatttatcagaaacagtgtatattaatgaaaataatgagagctacctgaaagctcagtttgaaaaattatctcaacgtgatatgaagaagtacctgggagagatgaagcgtctggctgatgggggagaaatgaattttgatggctatctggataagatgtcacatctggtgaatgaaggaacgctcgatcctgatattttaagcaaaatgcgagatgctgcaccacaattaattagcttcgcgaagtcgtttgacccaacctcaaaggaagagattaaaatacttacagacacttctaaattaatttatgatttgttcggggttaaatcggagaaataatatgtgaagttcttcgatagtatggaaggcattatataaaaggacccaatatttattgggttcttttttctctatcaatactattagcagggagatatatcaccagagtttaatgtgtgattttttatttatcgtcgaacctggattgtttatcattggccttaacaaagttaacggctaataagattatttccatcacttcgtgagagcttcatgccttgagaggatctcaattttcttttgcaatgagacaggcgcttcctgttgttatggtatagtaccccgctattgagcctcctgaatagtgatgctgaataacataaccccatgatatatcgataaaataatctctacatttgaaaatgcacggtaattctgaaatgcaaaaaatcaaccaaaccagcgcaatgcctgaaaaaactgacgttcactggagtggtcggtttagcgttgcaccaatgctcgactggacggacagacattgccgctatttcttgcgtctgctttcccgcaatacgttgctgtataccgaaatggtgaccacaggggcgattattcacggtaaaggtgattatctggcgtacagtgaagaagaacatccggtagcgttgcaactgggcggtagcgatccggcggcgctggcgcagtgtgcaaagctggcagaagcgcgcggatatgatgagatcaacctgaatgtcggctgcccgtctgaccgggtgcagaacggcatgtttggtgcgtgtctgatgggtaatgcgcagctggttgccgactgcgtgaaagcgatgcgcgatgtggtgtcgattccggtgacggtgaaaacgcgtattggcatcgacgaccaggacagctatgaatttctctgcgatttcatcaataccgtttccggcaaaggcgagtgtgagatgttcatcatccacgcacgtaaagcctggctttcggggttaagcccgaaagaaaaccgtgaaatcccgccgctcgattatccgcgtgtgtatcaactgaagcgtgactttccgcatctgacaatgtcgattaacggtggtatcaagtcgctggaagaggccaaagcacacctgcaacatatggatggcgtgatggtcgggcgcgaggcgtatcagaatccgggtattctggcggcggtagaccgggagatctttggttcctcggataccgatgccgatccggtggcggtagtgcgcgccatgtatccgtacattgagcgtgaactcagccaggggacgtatctcggccatattacccggcatatgttgggcttgttccagggtattcctggcgcgcggcagtggcggcgttatttaagtgaaaatgcccataaagcgggtgcagacattaatgtgctggaacacgcgctcaaactggtggcggataagcgttaacttttcaccaaaaagtagtcaaattcaccacgccctgcgcaccgtcgcggggcgttttgctgttaaatcaatagattatttttggcatgattcttgtaatgccagcaagagatttcatatttgggagagcatcatgctggaactactttttgtgattggcttttttgtcatgctgatggtcaccggcgtttcgttgctgggcattatcgccgcgctggttgtggcgacggccattatgttcctcggcggtatgctggcattgatgattaagttgctgccgtggttactactggcgattgcggtggtgtgggttattaaggcgattaaagcaccaaaagtgccgaaatatcagcgttatgaccgctggcgttactaagggattgtgcggatgatcacaacctaaggttttatccttagaacaaaataggaattgataatcaaatctgtcactattgcgcctctaacagattcatcgtgctgtaccctacatacagccgaactataaaaagaaagggcttcccaggtggaagccctatttcttttatggaatcagcaggctggaaccttgcgtcgcccggctttccagaatctcatgcgcacgctgcgcatccttcagcggatatttctgctgctcggcgacatcgaccttaatcacaccgctggcaatcaaagagaacagttcattactggcctcggttaattcctcccgcgtggtgatatagccttgcagggaagggcgtgtcacatacaacgagcctttttgattgagaatgcctaagttcacaccggtaaccgcacctgatgagttgccaaaactgaccattaagccgcggcgttgcaggcaatccagcgaccgttcccaggtgtctctgcccacggaatcgtacaccacgcgcactttcttaccgccggtgatctcttttaaccgctcgaccagatcctcttcacgatagttaataacctgccacgcgcccgcttttagcgcgctctgcgctttttgcgcggttcctacggtgccgataagtttcgcgcccagggcttttgcccactggcaggcaattaagccaacgccgccagccgctgcgtggaacaggaactgttcatcgggtttaatttcataggttttgcgcagcagataataaaccgttaagcctttcaggaaggatgccgcagcttgctcaaaagaaattgccgcaggcagaatcgccgctttatccgcaataatgttatgcacagagctgtaagcgcctaacgccgactgcgcatagactacacgatcgcctgccttaatatgctttacaccactgccgactttactcacgatgcctgctgcttcggtgcctaatccgctgggtagcgatggcggcgggtaaaggccgctgcggatatatgtgtcgataaaattgatgccgatggctttattttcgacctggatttcattctccgccggatcggcaggagtgaactctacggcttgaagtacttccgggccaccgtgcttgtgaaattcaattcgtgttgccatgtgtcctccagaacgtatcgtcagggtctgcttcatatgataaagtttcgacccattctttatctcggtaactccattcactatggcaggaaataaacccttcaacaaacagcaggctgaaccccgcgaacgcgatccacaagttgccgggctgaaagtgcctccgcactcgatcgaagcggagcagtcggtgttgggcggtttaatgctagataacgaacgctgggatgatgtagccgagcgtgtggtagcagacgatttttacacccgcccacaccgtcatatctttactgaaatggcgcgtttgcaggaaagcggtagccctatcgatctgattactcttgcggaatcgctggaacgccaggggcaactcgatagcgtcggtggttttgcttatctggcagagctgtcaaaaaatacgccaagtgcggctaacatcagtgcctatgcggacatcgtgcgtgaacgtgccgttgtccgtgagatgatctcggttgcgaatgagattgccgaagctggttttgatccgcaggggcgtaccagcgaagatctgctggatctggctgaatcccgcgtctttaaaattgccgaaagtcgtgcgaacaaagacgaagggccgaagaacatcgccgatgtgctcgacgcaaccgtggcgcgtattgagcagttgtttcagcagccacacgatggcgttaccggggtaaacaccggttatgacgatctcaacaaaaaaaccgctggcttgcagccgtcggatttgatcatcgtcgccgcgcgtccgtcgatgggtaaaacaacatttgcgatgaacctcgtcgaaaacgcggcgatgttgcaggataaaccggtacttatcttctcgctggagatgccatcagaacagatcatgatgcgttctctggcgtcgctgtcgcgcgttgaccagactaaaatccgtaccgggcagctcgatgacgaagactgggcgcgcatttccggcaccatgggtattttgctcgaaaaacgcaatatctatatcgatgactcctccggcctgacgccaacggaagtgcgttcccgcgcacgccgtattgcccgtgaacacggcggcatcgggcttatcatgatcgactacctgcaactgatgcgcgtaccggcgctttccgataaccgtacgctggaaattgcagaaatctctcgctcgctgaaagcactggcgaaagaactgaacgtgccggtggtggcgctgtcccagttgaaccgttctctggaacaacgtgccgacaaacgcccggtcaactccgacctgcgtgaatctggctctatcgagcaggatgcggacttgatcatgtttatctatcgtgatgaggtgtatcacgaaaacagtgatttaaaaggcatcgcggaaattattatcggtaaacaacgtaacggcccaatcgggacggtacgcctgacctttaacggtcaatggtcgcgcttcgacaactatgcggggccgcagtacgacgacgaataataattattttatgaattaggtaattaaagcaaacacttatcaaggaacacaaatgcaagcggcaactgttgtgattaaccgccgcgctctgcgacacaacctgcaacgtcttcgtgaactggcccctgccagtaaaatggttgcggtggtgaaagcgaacgcttatggtcacggtcttcttgagaccgcgcgaacgctccccgatgctgacgcctttggcgtagcccgtctcgaagaagctctgcgactgcgtgcggggggaatcaccaaacctgtactgttactcgaaggcttttttgatgccagagatctgccgacgatttctgcgcaacattttcataccgccgtgcataacgaagaacagctggctgcgctggaagaggctagcctggacgagccggttaccgtctggatgaaactcgataccggtatgcaccgtctgggcgtaaggccggaacaggctgaggcgttttatcatcgcctgacccagtgcaaaaacgttcgtcagccggtgaatatcgtcagccattttgcgcgcgcggatgaaccaaaatgtggcgcaaccgagaaacaactcgctatctttaataccttttgcgaaggcaaacctggtcaacgttccattgccgcgtcgggtggcattctgctgtggccacagtcgcattttgactgggtgcgcccgggcatcattctttatggcgtctcgccgctggaagatcgctccaccggtgccgattttggctgtcagccagtgatgtcactaacctccagcctgattgccgtgcgtgagcataaagccggagagcctgttggttatggtggaacctgggtaagcgaacgtgatacccgtcttggcgtagtcgcgatgggctatggcgatggttatccgcgcgccgcgccgtccggtacgccagtgctggtgaacggtcgcgaagtaccgattgtcgggcgcgtggcgatggatatgatctgcgtagacttaggtccacaggcgcaggacaaagccggggatccggtcattttatggggcgaaggtttgcccgtagaacgtatcgctgaaatgacgaaagtaagcgcttacgaacttattacgcgcctgacttcaagggtcgcgatgaaatacgtggattaatcgttctgtaatatttgattgtctgtgccggatgcggcgtgaatgccttatccggccaataaaatcctaaaaattcaataagttgatgttctttcatgctcttataaaggtcgtgcctctggcggatgtacgtttgtcatgagtctcactctgttgctaattgccgttcgctcctgaacatccactcgatcttcgccttcttccggtttattgtgttttaaccacctgcccgtaaacctggagaaccatcgcgtgtttcaaaaagttgacgcctacgctggcgacccgattcttacgcttatggagcgttttaaagaagaccctcgcagcgacaaagtgaatttaagtatcggtctgtactacaacgaagacggaattattccacaactgcaagccgtggcggaggcggaagcgcgcctgaatgcgcagcctcatggcgcttcgctttatttaccgatggaagggcttaactgctatcgccatgccattgcgccgctgctgtttggtgcggaccatccggtactgaaacaacagcgcgtagcaaccattcaaacccttggcggctccggggcattgaaagtgggcgcggatttcctgaaacgctacttcccggaatcaggcgtctgggtcagcgatcctacctgggaaaaccacgtagcaatattcgccggggctggattcgaagtgagtacttacccctggtatgacgaagcgactaacggcgtgcgctttaatgacctgttggcgacgctgaaaacattacctgcccgcagtattgtgttgctgcatccatgttgccacaacccaacgggtgccgatctcactaatgatcagtgggatgcggtgattgaaattctcaaagcccgcgagcttattccattcctcgatattgcctatcaaggatttggtgccggtatggaagaggatgcctacgctattcgcgccattgccagcgctggattacccgctctggtgagcaattcgttctcgaaaattttctccctttacggcgagcgcgtcggcggactttctgttatgtgtgaagatgccgaagccgctggccgcgtactggggcaattgaaagcaacagttcgccgcaactactccagcccgccgaattttggtgcgcaggtggtggctgcagtgctgaatgacgaggcattgaaagccagctggctggcggaagtagaagagatgcgtactcgcattctggcaatgcgtcaggaattggtgaaggtattaagcacagagatgccagaacgcaatttcgattatctgcttaatcagcgcggcatgttcagttataccggtttaagtgccgctcaggttgaccgactacgtgaagaatttggtgtctatctcatcgccagcggtcgcatgtgtgtcgccgggttaaatacggcaaatgtacaacgtgtggcaaaggcgtttgctgcggtgatgtaatgcaggaaagcaggctggagctacccagcctgcagtgaaattaaactgtcgtcgctttcactctttctttatagatgatttttttgatgccatcgttctacgtgagagataataaacgttgttagttcttttattgttaagcttatcccaattatctggaattccttatcctgtttttttgggtggagtaataatttctgcacatctaaccattattaaatttaataataagtatcgggtttgttacgatagaatatttctatatcctcaagaatatgctttgccttattgcctgtgactttctgagattcaattatagtatcgttaaattctaatgttaaagagaactcttttttccgctttgtgtaagtttaaccttatattgattaccaatatcaaataaaaaggtcctgtaatgagaataatcacctttaacctcctcggcaaaacagcaaagcgtgcaaatatacataaagtctttcttacccctgattttgttaactaaatcaataaatgcgtgaaaaactttacttgcaatagaacttgatacttcttctccaggtctaaaaaatcttttgcaatttttaactgtgtttctatgtataaaaagaaatctttggcataagagatatctttattatttagtgcatctagctcaacaggtaaagatgtcgttttgttgctattcacatatgatatattcatatcatcatctccatcgcgagtaataaaattaatcaccattgtagggtagggggctggtcaatcagaaatcatctttataaacttcgattgtttttgtaatgctgtatcattaagttcattaaatcgtacagcagataaatgttctatcaaatttcgctcatttgccgaggattcatcataataaacgtaaaattaatgtatccttacatcgagtaataaacattttttatacaaaaaaagacaggaacgtatttactgggttaaatataatcatcctgcttttcatcacaaaaaccgcagataatccttcctttccccggcagctggcgttatggtcagatggtttttgcaacaaatctcacaataaaaagtttcaacatactgactatttagggaaaaatatgcgcaagatcacacaggcaatcagtgccgtttgcttattgttcgctctaaacagttccgctgttgccctggcctcatctccttcaccgcttaaccctgggactaacgttgccaggcttgctgaacaggcacccattcattgggtttcggtcgcacaaattgaaaatagcctcgcagggcgtccgccaatggcggtggggtttgatatcgatgacacggtacttttttccagtccgggcttctggcgcggcaaaaaaaccttctcgccagaaagcgaagattatctgaaaaatcctgtgttctgggaaaaaatgaacaatggctgggatgaattcagcattccaaaagaggtcgctcgccagctgattgatatgcatgtacgccgcggtgacgcgatcttctttgtgactggtcgtagcccgacgaaaacagaaacggtttcaaaaacgctggcggataattttcatattcctgccaccaacatgaatccggtgatctttgcgggcgataaaccagggcaaaatacaaaatcgcaatggctgcaggataaaaatatccgaattttttatggcgattctgataatgatattaccgccgcacgcgatgtcggcgctcgtggtatccgcattctgcgcgcctccaactctacctacaaacccttgccacaagcgggtgcgtttggtgaagaggtgatcgtcaattcagaatactgacagagcgggagagcgtgatgctctcccgaatgctgtttttttaatcacacctttatcctttcgctgtcttgctgcaaactgattaagagagttttatcaaggagcagcacatgtggtatcaaaagacgctcacgcttagcgccaaatctcgtgggtttcatctggtaacggatgaaattctgaatcagctggctgatatgccgcgcgttaacatcggcttactgcatctgttgctgcaacatacctccgcctctctgacacttaatgagaactgcgatcccaccgtacgccacgacatggagcgttttttcctccgcaccgttcccgacaacggaaattatgagcatgactatgagggagcagacgatatgccttctcatatcaaatcctcaatgctgggaacatcgcttgtattgccggtgcataaagggcgtattcagaccggcacctggcaaggcatttggctgggggaacatcgcatccacggcggatcgcgtcgcatcatcgcgacactacaaggggagtaaaaaatgaccatttcggagttgctacaatattgcatggcaaaaccaggcgcagaacagagcgtgcataatgactggaaagcgacgcagatcaaagtggaagatgtactgtttgcgatggtgaaagaagtagaaaatcgcccagctgtttcgctgaaaaccagcccggagctggcggagctgctacgtcagcagcacagcgatgtgcgtccaagccgccatctgaataaagcgcactggagcaccgtgtatctcgacggttcgctgccagattcgcaaatctattatctggtggatgcgtcttatcagcaggcggtgaatttactgccggaagaaaaacgtaaattgctggtgcaactctgaaaggaaaaggccgctcagaaagcggccttaacgattacagcatcggcttaaggaagcgtgccgtgtgtgatgcttcgcactccgcgacggtttctggcgtaccggagacgaggatctcgccgccaccactgccgccttctggtcccaggtcgacaatccagtcagcggttttgatcacgtcgagattgtgctcaatcaccacaatggtgttgccctgatcgcgcagtttatgcagtacgtcgagcagttgctgaatatcggcgaagtgcagaccggtggtcggctcgtcgagaatatacagcgtctgcccggtgccgcgttttgacagttcacgcgccagcttcacgcgctgggcttcaccgcctgaaagggtggttgcggactgccccagtcgaatgtacgtcaggccaacgtccatcaacgtttgcagcttacgcgccagtgcaggtacggcatcaaagaactcacgcgcctcttcgatggtcatatccagcacttcgtggatggttttgcctttgtacttaatctccagcgtttcacggttatagcgtttacctttgcactggtcgcacggcacgtagatatccggcaggaagtgcatctccactttgatcacgccatcgccctgacaggcctcgcagcgtccgccacgaacgttaaagctgaaacgtcccggcgtatagccgcgcgcacgggattccggtacgcccgcaaacagttcgcgcacaggcgtaaacacgccggtataggtcgccgggttagaacgtggagtacgaccaattgggctttggtcgatatcgatcactttatcgaaatgctccagcccctgaatatcgcgatacggtgctggttcggcgatggtcgccccattcaactggcgttgggcaatcgggaacagtgtgtcgttaatcagcgtcgatttaccggaacctgaaaccccggtgatgcaggtaaacagacccaccggcagcgtcagcgtcacgtccttcaggttgttgccgcgtgcgcctgtcagcttcagcactttttccggattcgccggaacgcgtttcttcggcacttcaatcttgcgtttgccgctcatgtactgcccggtcaacgactccggcaccgccataatcgcttccagcggaccttctgcgaccacttcaccgccgtgaacacctgcgcccgggccaatgtcgatcacatggtcagcggcgcgaattgcgtcttcgtcgtgctccaccacaatcacggtattaccgagatcgcgcagatggataagcgtacccaacaggcgctcgttatcacgctggtgcaggccgatagacggctcgtccagcacgtacataacgccaaccaggcccgcaccaatctggctcgccagacggatacgctgtgcttcaccgccagaaagcgtttctgccgagcgggaaagcgtcaggtaattcaggccgacgttaacgaggaatttcagacgatcgccgatctctttaaggattttttctgcaatcttcgcccgctgacctgcgagtttgagattgttgaagaattccatcgcatgaccaatgctcatgtcggagatagcaggcagcggcgtattctcgacatacacgtggcgcgcttcccgacgcagacgcgtcccttcgcagctggcgcacggacgattactgataaacttggctaattcttcgcgtaccgcgctggattccgtctctttatagcggcgctccatattatgcagcacgccttcgaacggatgacgacgaatggaggtatcgccacgatcgttcatgtatttgaattcaatgttttctttgccagaaccgtacaacaccactttatgcacgttcgcgctcaggctgccccacggcgcttcgaggtcgaacttatagtgatctgccagcgatttcagcatctggaaataatagaagttgcggcgatcccagccacggatcgcaccaccagccagcgacagttccggattctggatcactcgatcaggatcgaaatattgctgtacgccaaggccgtcgcaggtcgggcaggcccccgccgggttgttaaacgaaaacagtcgcggctccagttcacgcatactgtagccgcaaattgggcaggcgaagttggcggagaacagcagctcttccgctttcgggtcgtccatatccgccactaccgcggtaccaccggaaagctccagcgcggtttcaaatgactcggcaagacgttgggtaagatcgtcacgcaccttgaagcgatcaaccaccacttcaatggtatgtttcttttgcagttccagttttggcggatcggaaagatcgcagacttcgccatcaatacgagcacggatgtagccctggcttgccaggttctccagcgttttggtgtgttcgcctttgcgctctttaatgattggcgcgagtagcatcagacgcttgccttccggctgcgacagcacgttatccaccatctggctgacggtttgcgccgccagcgggacgtcgtggtccggacagcgcggctcgccaacgcgggcgaataacaaacgcaaatagtcgtggatttcggtgattgtccccaccgtagaacgcgggttatgagacgtcgatttctgctcaattgagatggcaggagaaagcccctcaatatgatcgacgtccggcttttccatcagtgacagaaactgccgcgcgtaggcggaaagggattcaacgtaacggcgctgcccttcggcatataaggtgtcgaaagcgagcgaggatttgccagaacccgaaagcccggtcacgacaatgagcttgtcgcgggggataacgaggttgatgtttttgagattatgggtgcgggcgccccgaacttcgatcttatccattcacctttcccggattaaacgcttttttgcccggtggcatggtgctaccggcgatcacaaacggttaattatgacacaaattgacctgaatgaatatacagtattggaatgcattacccggagtgttgtgtaacaatgtctggccaggtttgtttcccggaaccgaggtcacaacatagtaaaagcgctattggtaatggtacaatcgcgcgtttacacttattcagaacgatttttttcaggagacacgaacatggccagcagaggcgtaaacaaggttattctcgttggtaatctgggtcaggacccggaagtacgctacatgccaaatggtggcgcagttgccaacattacgctggctacttccgaatcctggcgtgataaagcgaccggcgagatgaaagaacagactgaatggcaccgcgttgtgctgttcggcaaactggcagaagtggcgagcgaatatctgcgtaaaggttctcaggtttatatcgaaggtcagctgcgtacccgtaaatggaccgatcaatccggtcaggatcgctacaccacagaagtcgtggtgaacgttggcggcaccatgcagatgctgggtggtcgtcagggtggtggcgctccggcaggtggcaatatcggtggtggtcagccgcagggcggttggggtcagcctcagcagccgcagggtggcaatcagttcagcggcggcgcgcagtctcgcccgcagcagtccgctccggcagcgccgtctaacgagccgccgatggactttgatgatgacattccgttctgatttgtcattaaaacaataggttatattgttttaaggtggatgattaaagcatctgccagccataaaaaagaagcctccgttatggaggcttctacgtatcaggtcaaaatcattggccattgtggcggtgtctgattcatctcttctatcatcaccgactcgatgttgtgccagatagcggtgatgtccgccattgtgatgccaagcaaccccattgcgaaccaacaggcggaaacaacgcccagaccgctgctgatcaccgcaagcccgacataatcagaccgacgaaaacggatgttgagtgtgctggccagaaacatcattacggcactaagaagttgccagcgaagaagaaccacgccagtggtgagggtagccatcaaacaattcctctgaaaagagccgatgccctggacagcgcggcgttgttcacgggaggcgtggtacactctggctatcgcggggcttgcagaacacaaaaatgaaacactctgtttgtttcattaattttgtgaactatatcacaattgattgtttgttagccatattaggccgtgacttttattgctgtacagattatgtggtttttcagtggcattaagggcatatcttcccgccgcctctgcattcctgtaggaaattaattttgaatatcaatgaattattttcatccaggtgacgattagaaaggtatcaatttcaaatcaggcaaaagtgctatttataccgtaagatttatctaaagacgtcggtacccagggttttcaccttgcaatggccgggtataaacaggcaggaaattgatagcaatgagtcatcgtgcacgacaccaattactggcgttgccgggcattatctttttagttctctttcccatcattctttcgctatggattgccttcctttgggcaaaatcagaagtgaataatcagctccgaacctttgctcaactggcactggataaatccgagctggtcattcgccaggcagatttagtgagcgatgcagctgaacgctatcaggggcaagtttgcactccagcccatcaaaagcgaatgttgaatattattcgtggctatctttatattaatgaattgatctatgcccgtgataaccattttttatgctcatcgctgatagcgcctgtaaacggctatacgattgcaccggccgattataagcgtgaacctaacgtttctatctattattaccgcgatacgccttttttctctggctataaaatgacctatatgcagcggggaaattatgtggcggttatcaaccctctcttctggagtgaagtgatgtctgatgacccgacattgcaatggggtgtgtatgatacggtgacgaaaacctttttctcgttaagcaaagaggcctcggcagcaacgttttctccgctgattcatttgaaggatttaaccgtacaaagaaatggctatttatatgcgacagtttattcgacaaaacgcccaattgcagccattgttgcgacttcatatcaacgtcttataacccatttttataatcatcttatttttgcgttgcccgccggtattttggggagtcttgttctgctattactctggctacgtattcgacaaaactatttatctcccaaacgtaaattgcaacgcgccctcgaaaaacatcaactttgtctttattaccagccaataatcgatatcaaaacagaaaaatgtatcggcgctgaagcgttgttacgttggcctggtgagcaggggcaaataatgaatccggcagagtttattccgctggcagaaaaggaggggatgatagaacagataactgattatgttattgataatgtcttccgcgatctgggcgattacctggcaacacatgcagatcgctatgtttctattaacctgtcggcctccgattttcatacgtcacggttgatagcgcgaatcaatcagaaaacagagcaatacgcggtgcgtccgcagcaaattaaatttgaagtgactgagcatgcatttcttgatgttgacaaaatgacgccgattattctggctttccgccaggcatgttacgaagtggcaattgatgattttggtattggctactctaacttgcataaccttaaatcattgaatgtcgatattttgaaaatcgacaaatcgtttgttgaaacgctgaccacccacaaaaccagtcatttgattgcggaacacatcatcgagctggcgcacagcctggggttaaaaacgatcgctgaaggcgtcgaaactgaggagcaggttaactggctgcgcaaacgcggcgtgcgctattgccagggatggttctttgcgaaggcgatgccgccgcaggtgtttatgcaatggatggagcaattacccgcgcgggagttaacgcgcgggcaataaaattacaggcggtggcgataatcgctgggagtgcgatcaaactgccgacggaaaacgcgggagaaggtctgctgcgagacataacccaggtccattgcgatatcaaaaatcggacgctcggtggtgcgcaactcaacggcggccagtaacaggcggcgttggcgaatgtaatcgccaagcgtctgatgcgtcaccgtgcggaacattcgttgcaagtaccactttgaatagcctgatttttttgcgactacatcaatgttaagcggctggtcaatatgctcgtcaatccatgcgataagatcctgaataattttctgatgggacataaatctgcctcttttcagtgttcagttcgttaattcatctgttggggagtataattcctcaagttaacttgaggtaaagcgatttatggaaaagaaattaccccgcattaaagcgctgctaacccccggcgaagtggcgaaacgcagcggtgtggcggtatcggcgctgcatttctatgaaagtaaagggttgattaccagtatccgtaacagcggcaatcagcggcgatataaacgtgatgtgttgcgatatgttgcaattatcaaaattgctcagcgtattggcattccgctggcgaccattggtgaagcgtttggcgtgttgcccgaagggcatacgttaagtgcgaaagagtggaaacagctttcgtcccaatggcgagaagagttggatcggcgcattcataccttagtggcgctgcgtgacgaactggacggatgtattggttgtggctgcctttcgcgcagtgattgcccgttgcgtaacccgggcgaccgcttaggagaagaaggtaccggcgcacgcttgctggaagatgaacaaaactaaagcgccacaagggcgctttagtttgttttccggtctttgtctttctctctatcccgctggtacacaggagggtttcccccgacgtcaacacacctcattcgagcacgtggtggaggttccggttggtgttgatgctttaattgtatgtcaccgacgtttcttcgccagtgtaaaagtatactttttaaccgcaatatttttgtcatctcagacgattttttatcgcaatcctgaacggtatacggctcgataacgctgcaatcttgcgcaccgacgataacgtttgcgcatcaattgcctggtttttcatcgtcaagacaataaaagagaaaaaagcagcaaacttcggttgaaaaagccgctatgatcgccggataatcgtttgctttttttaccacccgttttgtatgcgcggagctaaacgtttgcttttttgcgacgcagcaaattgtcgcaaacctggagcaggaagataacgtttcgctggcaggggattgtccgccacgcatcttgacgaaaattaaactctcaggggatgttttcttatgtctacgccatcagcgcgtaccggcggttcactcgacgcctggtttaaaatttcacaacgtggaagcactgtccgtcaggaagtggttgccgggttaacaacgtttctggcgatggtctactcggtcatcgtcgttccaggtatgttgggtaaagcaggcttcccgcctgcggcagttttcgttgcaacctgtctggttgccggactcggttctatcgtgatgggtctgtgggctaatctgccgttggcgattggttgcgccatctccctgacagcgtttaccgcattcagcctggtgctggggcaacatattagcgtacctgtcgcgctgggtgccgtgttcctgatgggtgtgctgtttacggtaatttctgccacgggtatccgtagctggattttgcgcaacttgcctcacggtgtggcgcacggcacggggattggtatcggtctgttcctgctgctcattgccgctaacggtgtcggtctggtgattaaaaacccgcttgatggtctgcccgttgcgctgggtgatttcgcgaccttcccggtgattatgtcactggtaggtctggcggtgatcatcggcctggaaaaactgaaagtccctggtggcattctgctgaccattatcggtatctcaattgtcggtttgatcttcgatcctaacgtccatttctccggcgttttcgccatgccttcattgagcgatgaaaacggcaattcactgattggcagcctggacattatgggcgcgctgaatcctgtagtcctgccaagcgttctggcgctggtgatgacggcagtatttgatgccaccggaactatccgtgccgtcgccggccaggcgaacctgctggataaagatgggcagatcatcgacggtgggaaagcactgaccactgactccatgagcagcgttttctctggcctggtgggtgcggctccggcagcggtatacatcgagtctgcggcgggtacggcggcgggcggtaaaaccggtttgacggctatcaccgttggcgtgctgttcctcctgattctgttcctctctccgctctcttacctcgttccggggtatgcaacggctccggcgctgatgtacgttggcctgctgatgctgagcaacgtggcgaaaatcgactttgctgattttgttgatgcgatggcgggtctggttacggctgtattcatcgtgctgacctgtaacatcgtaacaggcatcatgatcggcttcgcgactctggtgattggtcgtctggtttccggcgaatggcgcaagttgaacatcggtacggtcgttatcgccgtggcgctggtgaccttctatgcgggtggctgggctatctaatctttcatcggattctgaaaacgggtggcaatggctgcccgtttttattttctccgcacattgtgtgagcttttgcgatattctgaaaaaaatgagaattcaggcataacgtctttctcagatcataaaaaacatcgcaaacagggaacgcatggaaatcttcttcaccatactgataatgaccctcgtggtctcgctgtccggggtggtcactcgtgtcatgccctttcagatcccgcttccgcttatgcaaatcgccatcggtgcgctactggcgtggccgacgtttggtttgcatgtggagtttgatcctgaactctttttagtcttgtttatcccgccgttgctgttcgctgatggctggaaaacgccgacccgtgaatttctcgaacatggtcgagagattttcggcctcgcgctggcgctggtggtggtcaccgtggtcggcattggcttccttatttactgggtggtgccgggcattccgctgatccctgcctttgcgctggcggcggtgctttctccgaccgatgctgtggcgctctccgggattgttggcgaagggcgcatcccgaaaaaaatcatgggcattttgcagggcgaagcgttgatgaatgacgcctccggtctggtgtcgttgaagtttgccgtagcagtggcgatggggacgatgatcttcaccgtcggcggtgcgacggtcgaatttatgaaagtagccattggcggtattctcgccggttttgtggtgagctggctgtacggtcgctcgctgcgattcctcagccgctggggcggtgatgaacccgcgacgcagatcgtcctgctgttcctgctgccattcgcttcttatctgattgccgaacatattggcgtttccggcatcctcgctgcggttgccgccgggatgaccatcacccgctccggtgtgatgcgccgtgcgccgctggcaatgcgcctgcgtgcaaacagcacctgggcgatgctggaatttgtctttaacggcatggtgttcctgctgttaggtctgcagctgccgggtattctggagacgtcgctgatggcagcagaaatcgaccctaacgtcgaaatctggatgctgtttaccaatattattctgatatatgcggcgctgatgctggtccgtttcggctggctgtggacgatgaaaaagttcagcaaccgcttcctgaagaagaagccgatggagtttggttcgtggaccacacgagaaatcctgatcgcgtctttcgccggggtgcgtggggcgatcactctggccggtgtgctctctatcccgctgctcttgccggatggtaacgtcttcccggcgcgctatgagctggtgttcctggcggctggcgtcattctcttctcgctgtttgtcggcgtggtgatgttgcctattctgctacaacacattgaagtcgcggatcattcgcaacaattgaaagaggaacgtattgcgcgagcggcaacggcagaagtggcgattgtggcgatccagaaaatggaggagcgtctggcggcggataccgaagagaatatcgataaccagctgcttacggaggtcagttctcgcgtcattggtaacctgcgtcgtcgcgccgatggacgtaacgacgttgaaagttccgtgcaggaagagaaccttgagcgtcgcttccgtctggcggcattgcgttctgaacgtgctgaactttaccacctgcgcgccacacgggagatcagcaacgaaacgctgcaaaaattactgcacgatctcgatttgcttgaagcgttgctaattgaggaaaatcagtaagccgaaagcgacgtaaccaggcccgaggtaatctgaaaaaggtgcaatcttttgcacctttaacaggttagctcgggctaacattcatgattctaaaacaaataaattatctctcttttaaagtcaattcattggctgttcttcgacttaacctcaatctgcatcttgcataatatctgcagtaatcttcatagcgactgcatgaagattatcctcagtttgtgacatgccagtatgagtggcacaatcttcttcaaagaatttctgtagtgttaccaggatatcactattaatggagatattttcctcaccacggagaatggtaatacccattccctggacgctagcctcatcgaaattaacacgatagagacggatattaaacatccaggcttttgttaaaacagaacagttgaaatggcaattgcttaaattggcattattaaaattaacattagccatattagagtcggtacatataaccatttcgaggaacgtatttgttaaccgcgtaaaaaagagtttgctatcaattaagtttatattctggagggttgctttattcaggttgacacgagacagatcagcatgttcaaagttaattaaatcaagtttagagaagctaaggtcggctctaaataaattaatatatggcgctattactttataaagatttacctcagccatgtatgccatataaaaatttgaataatcaaggaaggtatttttaatattggctctattcattgttgcattgtagaattgaacatgcatagcggaacatgaatttagagttccgtcagtcatttttatctgagcgaaatttgagtcatcgagaatacaattatcaaaaagtattttttccattatggcgaaattaaaattcgttttatacatattacagtcctgaaaaatagcgttttgtagtctgcaacctgcaaaattcgaattggataaatcttcatctttaatcacgatacctttcaggctaaggtgtgaaaaatcgtaaccaccatttactgtctgtgggatttcgatagtattattatggacggtgacattatttataaaatataccaccttaattgacacttccttatctttattaaggtaaactcttctcgtaattctatcgtcacatttattatttgcatgtgaagctatatctataaaatatttatgtattttcctgtccgtttctttcgtgatttttcctgatggtaaactatcataaattcttttcattttctgaatcaagcctatcactttttcatgatcatccattttgaaaagagagagggctttattgtcaattaacgtgtttttatgatgtttgctgtaattatctgattttgttttctttgtatgtgatggacttgtgacagagtggttatcgttaatcaggcaaagagggaaaaacatattatttaaaccattatagcgcataaaatatccttataattaacaagaaagaaaaggcatattctctgcattatcattttctacgactgtcaaaaatcgctcattttttaatgagtttatttgtttaatattatgggaaaaggtgatgcatttgggagaggaagagtattccccggtcagacgaccggggaaggggagagattaatgcgcgcggccttgctcaacgccaaagccggtctgggagcggataaactgcgcgcggaacagttcacgctcacgcgcgccttccgctgagttatcggttgccgagaagaaccagatgccgaggaatgccacggtgatagagaacagcgccgggtattcatacgggaagatggctttttcgtgaccaaggatctgtacccaaatcgtcgggccgaggatcatcagtactactgcggtaatcagccccagccagccacccatcatcgcgccacgcgtggtcagtttcgaccagtacatagaaagcagaatgatcgggaagttacagctcgccgcgatggcaaacgccagccccaccataaaggcgatgttctgattctcaaacagcacgccgaggataatcgcaatcacgccgaggatcagtacggtgatttttgatacccgcagctcttcacgttcggtcgcgccttttttgaagacgttagcgtacaagtcatgcgaaaccgcggatgcgcccgccagcgtcagacccgcaaccaccgcgaggatagtggcgaaagcaaccgctgaaataaaaccgaggaacaggttgccgcccactgcattcgccaggtgaacggccgccatgttgttaccaccaatcagatggcccgccgcgtctttatattccggattcgcaccaaccagcatgatcgcgccgaagccgataataaaggtcagaatatagaagtagcccataaacccggtggcgtagaacacgctcttacgtgcttcgcgggcatcgctgactgtaaagaagcgcatcagaatgtgcggcaagcccgccgtaccaaacatcagtcccagacccagagagagcgcggagatcggatctttcaccagcccgcccggcttcatgatgtcgacacctttcgggtgtaccgccatcgcttcactgaacagattgttgaagctaaagccgacgtgtttcatcaccataaaggccataaagctggcaccgaacagcaacagcacggctttgataatttgcacccaggtggtcgccagcatgccgccgaacaggacgtacatcatcatcagcacgccgaccagcaccaccgcaatgtgatagttaaggccaaacagcagctcgatcagtttacctgcgcccaccatctgggcgataaggtaaagcgccaccaccaccagagaaccacaggccgaaagaatacgaatcggcccttgtttcagacggtaagaggccacatcggcaaaggtgtagcgccccaggttacgcagacgttcggcaatcaggaacaaaatgatcggccagcccaccaggaagcccagcgagtaaattaagccgtcatagccggaggtaaacaccagcgcggagatccccaagaatgaggcggcggacatatagtccccggcaatcgccagcccgttctggaagccagtgatattgccgcctgcggtgtagtagtcgctacgagaacgtacgcgttttgatgcccagtaggtaatgccgagcgtaaacacgacgaaaatcaggaacataataatcgcctgccagttcgttggctggcgctctacggccccgctaatagcatccgcggcgttagctgcgaaagggagtgtggcggcaagcgccgtcagaactcttttcatgatgcttgtacctcatgcaggacttcattattaagacggtcgaattcgccgttcgcccgccagatgtagataccggtgagaacaaaggagatcacaatcactccaacaccaattggaataccgcgtgtgacgctggtgttcggattcagcggcgtgcccagccagccgggcgcgaaggcgatcagtaaaataaagccgatataaactgccagcataataatcgacaggatggtggcaaaccgttgccgtttttcgactaactccctgaaatgcgcattgtcttctatccgctgataaatagtgccattcatcacagattctccagaggtaatgtagggattgttttaattcccgctcccttatgggagaaggttaacgctcgggtaacccttgccgaatgtaggccggataaggcgtttacgccgcatccggcaatcaatgcctgatgcgacgctgtcgcgtcttatcaggcctacaaaccgttaccgactcgcatcgggcaattgtgggttacgatggcatcgcgatagcctgcttctcttcaagcagcttctcgactacgccaggatcggcaagcgtcgaggtatcgcccaggttgctggtatcgcccgccgcaattttgcgcagaatacggcgcataattttgccggagcgggttttaggcagggagtcggtccagtgcagcacgtctggcgtcgccagcgggccaatctctttacgcacccagttgcggacttctgcgtacagttctggtgacggttcctccccgtgattaagcgtgacgtaggcgtagatcgcctgacctttaatattgtgcggaatacctactacggcggcttcggcaatcttcggatgcgccaccagcgccgactcaatctctgccgtccccagacggtgaccggagacgttcagcacgtcgtccacacgcccggttatccagtaatagccatcttcatcgcgacgcgcgccgtcgccgctgaaatacatatttttgaaggtggagaagtaggtctgttcaaaacgttcgtgatcgccaaacagcgtacgcgcctgacccggccaggagtcggtgattaccaggctaccttcggtggccccctccagcgggttaccttcgttatcgaccagcgccggttgcacgccgaagaacggacgtgttgccgaaccggctttcagctcggtagcgccaggcagcggggtgatcatgaaaccgccggtttcggtctgccaccaggtatcgaccaccggacatttctcgttgccgatttttttccagtaccactcccacgcttccgggttaattggctcgcccacggaaccgagaatgcgcagcgacgaacggtcggtgccttcgatcgctttatcgccttccgccatcagcgcgcggatcgccgtgggtgcggtatagagaatattgacctgatgcttgtccaccacctgcgccatacgggcaggcgtcggccagttgggtacgccttcaaacatcagcgtggtcgcaccgcaggccagcgggccgtacagcaagtaactgtgtccggtcacccagcccacatcggcggtgcaccagtagatatcacccggatgataatcaaagacatatttaaaggtcagcgccgcgtacaccagataaccgccggtagtatgcagcacaccttttggcttaccggtagaaccggaggtgtagagaataaacagcggatcttcggcgttcatctcttccgcctggtgctgatcgctcgcttgctcaaccaggtcgtgccaccacaggtcgcgcccttcctgccagtcaattttcccgccagtacgcttcagtaccaccacatgctctacgctggtgacgttcgggtttttcagcgcgtcatcaacgtttttcttcagcggaatactgcgcccggcacgcacaccttcgtcggaagtgatcaccagtcgtgagttggaatcaataatgcgcccggcaacggcttccggcgagaagccgccgaaaatcaccgaatgcaccgcgccaatgcgggcgcaggccagcatcgcaaccgcggcttccggcaccatcggcatataaatcgccaccacatcaccttttttaatgcccagctcgagcagggtattggcgaagcggcagacgtcgcggtgcagctctttatagctgatatgtttgctctggctggcgtcgtcgccttcccagatgatggcggtacgatcgccgttttcttgcagatggcggtcaaggcagtttgccgccagattcagcgtgccgtcctcgtaccatttaatggacacattaccgggggcaaaggaggtgtttttcaccttctggtaaggtttgatccagtcaagaatttttccctgttcgccccagaaggtatcaggtacgttaatagattgttgatacatcgcctcgtactgctgagggtttatcaggcaacggtctgcgatgttggcaggaatggtgtgtttgtgaatttggctcatgcttttgttctccttgtaggatgttaataatatgtggcataagcgttaaatgtaggggtattggcagttttgtttagtatttgggcgacagatcacgcaaaagtagaattgtgcaaataaacggcagggtaatttttgaaggtcagcaacaaaagttgattaattctttgaggaacatgcagttatgcatgctgttgaaaaagaggaagatactgactaactctaaagtggtattttacatgcacttacaattgattaaagacaacattcacagtgtggttatttgttacacataggggcgagcaatgtcatgacagtgtaggtgcggttactgtcgtgaaaaacaataaaaaccgccattgcaacaatggcgcaattcggatgaagcccctatgacaaggataaaaataaacgcacgccgtatcttcagcttattgattccttttttctttttcacttctgttcacgctgaacaaacggctgctcccgcaaaacctgtaactgtggaagcgaagaatgaaacctttgccccgcagcatcccgatcaatatctctcctggaaagccacctcggaacagtcagagcgtgttgacgccctggcggaagatccacggctggtgatcctgtgggcggggtatcccttctcgcgcgattacaacaagccgcgtggacatgcttttgctgtgaccgatgtgcgtgaaaccctgcgtaccggtgcgccgaaaaacgctgaagatggtccgctaccgatggcatgctggagttgtaaaagcccggatgtggcgcgtctgatccagaaagacggcgaagatggctacttccacggtaaatgggcgcgcggcggtccggaaatcgtcaacaacttaggttgtgccgattgccataacaccgcctctccagagttcgccaaaggcaaaccggagttaaccctttcccgtccgtatgcggctcgcgcgatggaagccattggtaaaccttttgagaaagccggacgtttcgaccagcaatcgatggtttgcggtcagtgccatgtggagtattacttcgacggcaaaaacaaagcggttaaattcccgtgggatgacggcatgaaagtcgaaaatatggagcagtattacgacaaaattgccttctctgactggactaactccctgtcgaaaacgccaatgctgaaagcgcagcacccggaatatgaaacctggacagcgggcattcacggtaaaaacaacgtgacctgtatcgactgccatatgccaaaagtgcagaacgccgaaggcaaactctacaccgaccataaaattggtaatccgtttgataacttcgcccagacttgtgcgaactgccatacccaggacaaagctgccttgcaaaaagtggtcgcggaacgtaagcagtcgattaacgacctgaaaatcaaggttgaagatcaactggttcacgctcacttcgaagcgaaagcagcgctggatgcaggcgcgacggaagctgaaatgaagccaattcaggacgatatccgtcatgcccagtggcgctgggatctggcgatcgcttcccacggcattcatatgcacgcaccggaagaaggtttacggatgctcggtacggcgatggataaagcggcggatgcacgcaccaaactggcgcgcctgctggcgaccaaaggcatcacccatgaaatccagatcccggatatctcaaccaaagagaaagcccagcaggccattggcctgaacatggaacaaatcaaggccgagaagcaggacttcatcaaaacggtgatcccgcagtgggaagaacaggcacgtaaaaacggtctgttaagccaataaccccgttccgcctcgcaaggggcggaaaacacaatggagtgaatatgagcgtattacgttcgttattaactgccggggtgctggcgtcgggcctgttgtggagcctgaacggaattaccgctacccctgcggcgcaggcatctgatgatcgctacgaagttacccagcagcgtaacccggatgccgcctgtctggactgtcataaaccagataccgaaggtatgcatggaaaacatgcttccgttatcaacccgaaggtgatgctgccaacttactgatttagtgtatgatggtgtttttgaggtgctccagtggcttctgtttctatcagctgtccctcctgttcagctactgacggggtggtgcgtaacggcaaaagcaccgccggacatcagcgctatctctgctctcactgccgtaaaacatggcaactgcagttcacttacaccgcttctcaacccggtacgcaccagaaaatcattgatatggccatgaatggcgttggatgccgggcaacagcccgcattatgggcgttggcctcaacacgattttacgtcacttaaaaaactcaggccgcagtcggtaacctcgcgcatacagccgggcagtgacgtcatcgtctgcgcggaaatggacgaacagtggggctatgtcggggctaaatcgcgccagcgctggctgttttacgcgtatgacagtctccggaagacggttgttgcgcacgtattcggtgaacgcactatggcgacgctggggcgtcttatgagcctgctgtcaccctttgacgtggtgatatggatgacggatggctggccgctgtatgaatcccgcctgaagggaaagctgcacgtaatcagcaagcgatatacgcagcgaattgagcggcataacctgaatctgaggcagcacctggcacggctgggacggaagtcgctgtcgttctcaaaatcggtggagctgcatgacaaagtcatcgggcattatctgaacataaaacactatcaataagttggagtcattacccaacccgaataacaaactgccggtcacctgcaccaactgtcacggccagccatcaccgcaacaccgcgaaggggtgaaagatgtgatgcgctttaacgagccgatgtacaaggttggagagcagaacagcgtctgtatgtcctgtcatctgccggaacagttgcaaaaagcgttctggccgcacgatgtccacgtaaccaaagtggcgtgcgccagctgccattccctgcatccacagcaagatacgatgcagacgttaagtgacaaaggacggattaagatttgcgtcgattgccacagcgatcagcgcaccaatccgaactttaacccggcgtctgttccgttgcttaaggagcagccatgacctggtctcgtcgccagtttctcaccggcgtcggcgtgctggcagccgtcagcggcaccgcagggcgcgtggtggcgaaaacgttgaatatcaatggggtgcgttacggcatggtgcatgacgagtcgttatgcatcggctgtaccgcctgtatggatgcttgtcgggaagtgaacaaggtgccggaaggcgtctcgcgcctgacgattattcgtagcgagccgcagggcgaatttcctgatgtgaaatatcgcttcttccgtaagtcttgccagcactgcgatcatgcgccgtgcgttgacgtctgcccgaccggtgcgtcttttcgcgatgctgccagtgggattgtcgatgttaatccggatctctgcgtcggttgtcagtactgcatcgccgcctgtccgtaccgcgtgcgctttatccatccggtcacgaagacggcggacaaatgcgatttctgccgtaagaccaatttgcaggccggtaagttgcccgcgtgcgttgaagcttgcccgaccaaggcgctgacgtttggcaatctggacgatcccaacagtgagatttcgcaactgctgcgccagaagcccacttaccgctacaagctggcgctgggaaccaaaccgaagctgtaccgcgtaccgtttaaatacggggaggtgagccaatgacgcagacttccgcatttcattttgaatcgctggtgtgggactggccgattgccatctacctgtttttgattggtatttctgctggtctggtgacgctggccgtgctgttacgtcgcttctacccgcaggcgggcggtgcagacagtacgttgctgcgcaccacgctgattgtcgggccgggcgcggtgatcctcggtctgttgatcctcgtcttccacctgacaagaccgtggaccttctggaagctgatgttccactacagttttacctcggtgatgtcgatgggggtgatgctgtttcagctctacatggtggtgctggtgctgtggctggcgaaaatctttgaacatgatttgcttgccctgcaacaacgctggttgccgaagctggggatcgtgcaaaaggttctgagcctgctgacgcccgttcatcgcggactggaaacattgatgctggtgctggcggtgttgttgggggcttataccggctttctgctgtcggcgctgaaatcgtatccgttcctcaataacccgatcctgccggtgctgttcctcttctccggcatctcgtccggtgcggcggtggcgctgatcgccatggcgatacgccaacgcagtaacccgcattccacggaagcgcagtttgtacaccgtatggaaatccctgtggtatggggtgaaatcttcctgctggtggcgttttttgtcggtctggcgctgggcgatgacggtaaagttcgtgcgctggtggcggcattaggtggcggtttctggacgtggtggttctggcttggtgtcgccgggctggggctgattgtgccaatgctgctcaaaccgtgggtcaatcgcagttccggcattcctgccgtgctggcggcgtgtggggccagtctggtcggcgtgttgatgctgcgctttttcattctctacgccggacagttgacggtggcgtaagccagaaaagaggtggtttctggacgtattccttcctgaagtcggttttctggcgttgttgttaagtctcggggtcaacgtgttgaccccgttgacggccttcgcgggagtgcggttgcgctggcctgccatgatgcgactcacttgcatcggcattctggcgcagttcgcgctcctgctgctcgcctttggcgtactgacgtattgttttctcatcagcgatttctcggtcatttatgtcgcgcaacatagctatagcctgctgtcgtgggaactcaagctggcagcggtgtggggcggccatgaaggttcgctgctgctttgggtgctgctgctttccgcctggagcgcgctgtttgcctggcattatcggcagcaaaccgatccgctatttccgctgacgttagccgttttatctctcatgctcgccgcactgctactgtttgtggtgctgtggtccgatcccttcgtgcggatatttccaccagcaatcgaaggccgcgatctcaatccgatgctgcaacatcccggtcttatctttcatccaccgctgctttaccttggctatggcggtttgatggtagcggcgagcgtggcgctggcgagtctactgcgcggcgagtttgatggtgcctgcgcccgaatttgctggcgctgggcgttacctggctggagtgcattaacggcggggatcatcctcggttcctggtgggcctactgcgaactcggctggggcggctggtggttctgggatccggtggaaaacgcctctttattaccctggctttctgccactgcgctgctgcacagtttgtccctgacacgccagcgggggattttttgccactggtcgctgttgctggcgatagttactctgatgctgtcgctgctgggcaccttaattgtccgttctggcattctggtttcggttcatgcgttcgcgctggataacgtccgcgccgtgccgttgttcagcctgtttgcactgattagccttgcgtctctggctctgtatggctggcgagcgcgggacggtggcccggcggtgcatttttcggggttatcgcgggaaatgttaatcctcgctacgctgttgctgttttgcgcagtgctactgatcgtgctggtgggaacgctttatccgatgatttacggcctgctgggctggggacgcctctccgttggcgcgccgtattttaaccgcgcgacgttaccgtttggtctgttgatgctggtggtgattgtgctggcgacgtttgtctctggcaaacgcgtgcagcttccggcgctggtagctcatgcgggcgtgctgttatttgccgctggggtcgtggtctccagcgtcagccgtcaggagatcagcctgaatttacagccgggtcagcaggtgacgctggcaggatacaccttccgttttgagtgcctcgatctacaagccaaaggcaattacaccagcgaaaaagcgatagtggcactgtttgaccatcagcaacgcattggtgaactgacgccggagcggcgtttttatgaagcacgccgtcaacaaatgatggaaccgtcaattcgctggaacggcatccatgactggtatgcggtcatgggggagaaaactgggccggatcgttacgcttttcgtttgtatgtacaaagcggtgtgcgctggatctgggggggaggattgttgatgattgcgggcgcattgttaagcggatggcgggggaagaagcgcgatgaataaagggcttctcacgctactgctgttatttacctgttttgcgcacgctcaggtcgtagacacctggcaattcgccaatccgcaacaacagcaacaggcgttaaatattgccagccagttacgttgtccgcagtgccagaatcaaaacttactggaatccaacgcgccggtggctgtcagtatgcgccatcaggtttacagcatggtggcggaggggaagaacgaagtcgaaatcattggctggatgaccgaacgctacggagattttgttcgctataacccaccgttaacgggtcagacgctggtgttatgggcgctgccagtggtgttgttactgctgatggcactgatcctctggcgagtgagggcgaagcgatgaaacagcccaaaataccggtgaaaatgctgacaacactcacgatattgatggtatttctctgtgtcggcagttatctgttaagcccaaaatggcaggcggtacgtgcggagtatcagcgtcagcgcgatccgctacatcagtttgccagccagcaaaccccggaagcgcagcttcaggcattgcaggataaaatccgcgctaatccacaaaacagcgaacagtgggcgttactgggcgagtactatctgtggcaaaacgattacagcaattcgttgctggcgtaccgtcaggcgttgcaactacgtggtgagaacgctgaactgtatgcggcgctggcgacggtgctttattaccaggccagccagcatatgaccgcccagactcgcgcaatgatcgacaaagccctcgcgctggacagtaatgaaatcaccgccctgatgctgctggcttccgatgcgtttatgcaggcgaactacgcgcaagccatcgaactatggcaaaaagtgatggatctcaactcaccgcgagttaaccgaacacagctggttgagtcgattaatatggcgaaattgttgcagcggagattggattaatcatctggtgatgaagattatgtcattgagctgcataaaaaataatcgaatgaacatatgccaaaaataatcactaatcagtattattgcagattaaacaaataaaaatctttccataacaaatggttattcattaatcctgccataaactcgcgttattatgcattaatgcagcgaaaagctctgttgttaaagggttgcgcaacataccgcgcaaatgatactgatcataagcgttaaaaaaatctacaaaccaacgcaacacaattcatgccctggcagtatgtcacgttctcgcgtttctgaacggggaacggcgctccattgaggaagtcattcatatgaaaaatataaaattcagcctggcctggcagattctgtttgctatggtgctgggcattctcctgggaagctacctgcactaccatagcgacagccgcgactggctggtcgtcaatttgctctctccggcgggtgatatcttcatccatctgattaaaatgattgttgtgccgattgtgatctccacgctggtggtgggtatcgcgggtgttggtgatgccaaacagctcgggcgtattggcgcgaaaaccattatctacttcgaggtgatcaccaccgtcgccatcattttggggatcactctggcgaacgtcttccagcccggtgccggggtggatatgtcgcagttggcgaccgtcgatatctcgaaatatcagagcactacggaagcggtacaaagcagttcccacggcattatgggcacgattttgtcgctggtgccgacgaacattgtggcgtcgatggcgaaaggcgaaatgctgccgatcatctttttctcggtgctgtttggtctggggctttcttccctgcccgcgacgcatcgtgaaccgctggtgaccgtgttccgctccatctctgaaaccatgtttaaagtgactcacatggtgatgcgttatgcaccggtgggtgtgtttgcgctgattgcggtgacggtggctaactttggtttctcgtctctgtggccactggcgaaactggtgctgctggtgcatttcgccattctgttcttcgcgctggtagtgctgggaattgtggcgcgcctgtgcgggttaagcgtctggatcctgattcgtattctgaaagatgagctgattctggcgtactccactgccagctctgaaagcgtgctgccgcgaattattgagaagatggaagcctacggagcaccggtgtcgatcaccagtttcgtggtgccgaccggttactcttttaaccttgatggttcgacgctgtatcaaagtattgccgctatcttcatcgcgcagttgtatggcattgacctgtccatctggcaggaaatcattctggtgctgacgctgatggtgacctcgaaagggattgctggcgtgcctggcgtgtcgtttgtggtgttgctggcaacgctgggtagcgtaggtattccgctggaaggtctggcgtttattgctggtgttgaccgtatcctcgacatggcgcgtactgcgctgaacgtggtgggtaatgcgctggcggtgctggtgattgccaagtgggaacacaaatttgaccgtaagaaagcgctggcttatgagcgtgaagtgctgggcaaatttgataaaactgcggatcaataattgaagattgccggggatatccacccggcaatgtgtgaatgcctgatgcgacgcttgccgcgtcttatcaggcctacgccagacagcgcaatagcctgatttagcgtgattttgtaggtcggataaggcgtttatgccgcatccgacatcaacgcctgatgcgacgcttaacgcgtcttatcaggcctacgccagacagcgcaatagcctgatttagcgtgattttgtaggtcggataaggcgtttacgccgcatccgacatcaacgcctgatgcgacgcttgccgcgtcttatcaggcctacgccagacagcgcaatagcctgatttagcgtgattttgtaggtcggataaggcgtttatgccgcatccgacatcaacgcctgatgcgacgcttaacgcgtcttatcaggcctacgccagacagcgcaatagcctgatttagcgtgattttgtaggtcggataaggcgtttacgccgcatccgacatcaatgcctgatgcgacgcttgccgcgtcttatcaggcctatcttaaccgttggttaatttttcaaactcttcacacccggtatcaaacccttccatacagctcaggttcaaccagtgcagcgccttttgcttgttcttctcgataaaaccttcttcaccgtttaagaacatcattcccgcccagtactcggaataaccggttcgggaaattgcagagctgcgtttgaaataccaggttgccttgtcatcgtcggccttaatgcccacgccgttggcgtaaatcaaaccaagcagcatttgggcatcgacggcagagtcgttctccagatcttccgaggcgttttctaacagcgaaattgcctttggataatccggtttacccgcttgagtatttaccagaatatgcgccagcgttacttcaccttctttactgcccgcttgcgccgctttctctgcaagaacttttgcttgtggatagtccagactgaccggattggtgattttgatctgcgccagcagcgcgcaggcatcagcatcaccgctgtcggcggctttctgtgcccaatattcggctttgctcaaatcgccggagctaaaccagctgtcggcaagaaaatattgtgcgcgtcggtccccggcctctgctgcctttaaatactggctgccaggctcggagtcgttggcgtgggcaaagaatgtcaaaaacaacatcaatgcgataatttttttcattttgataatacgattgggtagggagtaaccagtataaagagttcgaatggataaaaaaacagcctccgaaaggaggctgtagaaaggacggtattacgccagtgccgcttcgcgcaggcgagttttcaacttgttgtactcgtcaatcacgtactgctcggcggcgcgctgatcggcgatcggctcgacgcgaacggcgcagtatttgtactccggcgttttcgtaatcgggcttaagttttcggtaaccagctcgttacaggcaccaatccaccactggtaggtcatgtaaatcgcccctttgttcggacgatcgctgacctgcgcacgggtgataattttgcctttacgcgagtgcacccaaaccaatgcctcatcttcaatacccagacgtttggcgtcttcggtattgatttgtgcgtagccaggttcatcagccagcgccgccagtgccgcacagttaccggtcatcgaacggcaagagtagtgaccaacttcacgcaccgttgacagtaccatcgggtactcgtcggtgagtttgtcgattggcgctacccagtcgcaggtgaagaactgcgccagaccgttcggggtatcaaacttctctttaaacagataagaagtcccctgatcggcatctgaagtatcgcggcaaggccactgaatgaagcccagttcgcccattttctcgtaagtcgcaccgtagaaatccgggcacagatgacgcaactcatcccagatctcctgggtgttgttgtagtgcatcggataacccatacgggtggcgatttcactgatgatttgccagtccgttttcagatcccatttcggttcaaccgccttgaagaaacgctggaagccacggtcagccgcagtaaacacgccttcatgctcgccccacgacgttgacggtaaaataacatccgccgccgacgcggttttggtcataaagatgtcctgaacgataaccagttccagatcttcaaaggctttacgtactgccgacagctccgcgtcagtttgtagcggatcttcgcccataatgtacgcggcacgcacttcgccatgcgctgcgcggtgcggcagctcgctgatgcgatagccggtatgcgctggcaggctttccacgccccaggctttggcgaatttctcgcggttagccggatctttcacgtactggtatcccggatacgtatccggcagcgcgcccatatcgcaggcaccctgaacgttgttctgaccacgaaccgggttaacacccgcatgcggcttaccgaggttaccggtcagcatcgcgaggctggtcagagaacgcacggtttccacgccctggtagaactgggttacacccatgccccacaggatggcggcgcttttcgcctgggcatacatccgtgccgcctgacgaatctcactggcgctgacgccggtgatatcttcaaccgactccggcgtgtagccttcaacgattttacgatactcttcaaagccttctgtacgtgaagcgacgaacgctttgtcgtacagattttcttcaataatgacatggcccatcgcattcaacagcgcgatgttcgagccgtttttcagtgcaatgtgcatgtcagcaatgcgcgcggtttcaattttgcgcggatcgcagacgataattttcgccccgttacgtttagcgttaattacgtgattcgccacgattgggtgggaatccgccgggttgtacccgaaaacgaacactaaatcggtattatcaatttcgttaatagcattgctcattgcgccattaccgaccgattggtgcagacctgcaaccgatgggccgtgtcagacacgagcgcagcagtcaacgttattggtaccaataacggcgcgcgcaaatttttgcattacatagttggtttcgttacccgtaccacgcgaggagccggtcgtctggatggcatccggaccgtacttctctttgatggcgctcaggcgctcggcaacgtaattcagtgcctcatcccaggaaacaggttcgagtttgccgccacgctggcgacggatcatgggggttttcaggcgcggggtcaggatctgggtatcgttaatgaagtcccagccataataacccttcagacacagggtaccctggttggttttcccctgcgctgcctccgcccggacgattttgccgttatcgacgaccaggttgattttgcaacctgatgcgcaataggggcaaaccgtgacgacttttttcatcggtctcgctccagttaatcaaatcacgcatacgcgctctcgactacagtatgcatcttttatgccacattttatgtggggtcattccctgatattacgggcactatttattcaaaactctgacgaaaaacaggctgtcgtcagttttgacgtgacgaaacgaaataccgcgtgacagccatcacgcggcagacattttattttttctcgacgacgggacctgcctgatacccgccgcccagcgatttcatcaactgaatgctttggatcacccggcggctgtccagcatcagtaatgacatctcttcggcaagcactggcaaccgggcttcggtggcctgtaagcggctggttaagccgcgctgataggcggcctcggcagcgcgctgggtaaagcgcgtggcttccacgcgttcagcctgcatttctcgctcgtcgttgagcgtttgcagacgcgtgccgttgacggcaacgtcacgcaccgcgttcagtactgactggttgtaacgttcaatcatcatgttgctggcggcgcgcgtgccttcgagattggcattcaaccgtccaccgtcaaacagcggcaatttcagacccgggatgaagttgaactggcgactggtttttttgaataaggtatgcagatggatggagtccagaccgaaaaacgctttgatatcaaagctcggatagaacaacgcccgcgcggaatccacctgatctaatgacgcctgaacataccagcgcatggcttgcagatccgggcgtctggcgagcaactcataagagagtgtcgccggaatgccggtctggacttgcggtaatgccaccggtctgatctccggcatatcgctggctcccgcgccaatcaatgcacgcagagattctcgcgtttcggtgatttgccctttgacggcaacaatttgtttatcgaccgccagaatctgtgcccgcgcgccgtggaaaggcacttgcgcttccagaccgtgcgccactttactctggtgcgctttcaccgcgtaatcaatcacatcgtgagtttgttctaacagatcgagcatctgatagctggcctgcatactgtaataaagctgcgctacgcccgtggccagcgatagctctactgctgcggtttctgccagcgcggcattatgcgcgccaatggcggcggcaaccgctgagcgatgcacaccccacaaatcaagatccagtccggcaaacaaacctactgtggcttccgtatagtacggcccgtccatacccagtgctggcgcatccattgaataagggcttaaaaagccgttcgccgagacacgttggcggttgagcatccctaacgctgcgacctgtaattgtgaaccggcatctaacaaatcggcctgggactgcgctttttcttcccgcagtttcgcttcggcgagggtgtgtgaaccacttagcgtccgttggatcagcgcatccagctgcgggtcattgagttgtttccaccactgcgcctgcggccagccggagctggcaagatgaatatcgtcggccagtttgatttgttccggtttgagctgttgatgaggtgcagaatccttacgtaccagggcacagccggaaatcagcgtcgtgctgccgagaatgctgcacaacagcagacgtgaaagttgacgattgatcattgcgtggctccttgtgcctgttccgtggcgggcgttaatgccggggctgtccagtctggcaagcgggcgaaaagctggcagacgtgttgctcctgttttaataaggtgggcaggatggcctgagaggcgggtgtctcttcaagcgttatttgaggagaacggctgagtgcggttgccagaccggcagcgtatttctccagggcgtcggcaaactgacctgctctgtccggctgtagtgcgttatccagcgcctgcgccgagttccaggtggcatcccaggcgtgaagaagatcgcggccctgacgaataaccgtttgcgaacgttcaatcagtaatgcgcgttcttcgctgtccagttgacgctccagcgccacgcgttggcacatctcttcacaggcattaaacgccgcatgcagaccgatacgaatttgcagataagtgcgcagagccgtgacttcctgctggcgtgggatccgcattactttacttaacatacccagcgtgccagccagtttttgcggcagtgtgcgcgcttcactttcaggccagacaaaggtgtaaatcaccgcggacaccacggtaccaatgatgatacccagggcgcgatcgcgaatttccaccaggtcgtacactgggccaaaaacgttttcgagcgtggcgagcgcgaaggtgaccaccatctgtgtgccgatataagaagagcgttcagagctggtggcaatccatgcgcccaacaggaaaatcggtgccagcacaaacagcaattcgacaatattgtccagccagggcatgaccagtagcgtgaataacagcgccagaatcgcgccgcaaaaggccccgccaaaacgcagcaccatcttctggtacgacgaaccgacatttgggttagcgacgatcacgcatgtcagcatacaggtgtgaatgccttcccagtccacgccgctgtaaaaggtgtaacagatcaaacaggcgagcagcgtttttaccgcgtagcgcatatagtctggattggtaaaagcatcggcggccattgatggcggtttggctgcgggcgttggcggcgtattcgggtccatctgacccagttgtaacaacgtctggcagatattctccaggttacattcccgtgccgccatcgcttcactttcactgatccgccagtcgctttgccagcactgaccttcagcaacggcatgctgcagcttgttgatttctgaagctaatttttgtcggaattcaataattgcctgagaatcagcaaaagaggtgggatcgtagcgattcagcgtcgagtaaatgtaggttaccgttgccacgcagctttgccaccatgcgttttgagttcgccagttggcatcgtccgcgaggcaaaagacattgagtttttgtagcgccagcgcctctctttcaatccgcgtttcgggtagcggtgcgaggctgtctgtcaggtgactaatggcatcatcaagccgatcattaagcgcctgatgcatttgcgaaatggcacgactgggaaaccacagcacgccgattaacgtcatcagcaaggttggatagaggccaacaacgatacaccacagcgttaagcgcacgaccacttccggatagtcgagcatggcggggaaggtttgcccgtaaatagcgacaatggcgacggcgaaaaagaccagccccaagcgatgggtgcgcatcaaaaacatgcagcccatcaggatcggtccggcgatgatcaatcggatcaacggttcgccgtatgaccatttgtagatcaaaaacaggctgccgatctccagcaccgtggcaaccacaaacaagatcgcgacaaatttggtgtaaaacgcgttcgactgaataccgtaaaacagcactgccagcgataacgccacaaaagggatctcaaaggtcatcgagatcagaatcaccagcaggcagcctacccagagttgcacggtctgcggcacgcgacctggtcgccgctcgcttaactcttcatgaaagaacgccagcagcctgaccaccggtaatggcagggagttgagcgcgctcattattgcggctcaagattagcgactgccgaagcgccgatgcggaacatttccgggtcaggtttatcgaccatgattttgaccggaaaacgctgggcaacgcggacccagttaatagaacgagacactttcggcaggccgcccagcaccaggccgccgtcatccggtagcacgccgtagccaatcgaatccactttaccctcgaaggttttgccgctgtcactcatcaggcgaatcgttgcgggtgtacctgagcgaatatttttcagatcggtttcgcggaagttggcgatcacataccagtgacgagtgtcgattagggtaaaaatagggcgcatggcagaagcaaattgcccgacggaggttttgagggaaatgacccggccatcaaacggcgcgcgaacggtcgccatttccagatgcagtttggtcagggcaatatccgcttcgaccgccgcacgctgggcaactaatgcatccacgccgctgacggcgctggcggctgactgcgcctgtaacaatacggcattaagatccgcttctgcggcgcgctgcgccgttcttgcacggtcaacatcttccgctgagacaaaaccttctttcagtaatggctcggtgcggcgtaatgtatctgtggcctgtttcgcggcggcacgggctttttctaccgtggcattaaccgagtcggcaccaaactgttgcgcgtcaacgctacgctgggtgagcataatttgcttatccagcgccgcgagggaggcttcagctttcgccagattggcttcgtacgggcgcgggtcgatgcggaacagcaaatcgccctgtttgactgcctggttgtcggtgaccgccagttctacaatgcggccgctgacttccggtaccacatcaatggtatctgctgacgcgtaagcgtcattagttgatggcgcactgtctacgcgccagataacgaaaacaagggcaaccagcgccaacgcaaccactaacagagcagggaatttactgcgaggagcttttttcggcgtactttccatgagcgcgtctcaaatagattagaaaaatgccagccagaacagcatggcgtagagagcaaaaagggcggtataaataattccgacaaatgccagattgatatttgcccgctgaataactcgcctcgtgatgagcgtcaaaataaggctggcaatggcgcagaaaaaccagctgggataataagcgccgatcaccgggattgccggagataatgagcatcccgaaaccatgaagacgggaattatccaggctgtttttttgagttgcatcgccatgcgagagagaactgttggcatattaaatacatcctgtctgctgcgaacaatatctgtagtgaatatcaatatccattgaaggcgtcagtatggctattttcttgatgaataaaaatagctttattcagccaccgcattcataacttatatattttatttattaattggctgtatatatttttaaaataaatacttttgggggcttcagcgcccccaaaagcgagtgacattaatttggggttacgatattcacccacaaatcgaaattatccagacaggcgataatttcttccagtttcgcgccattgccaataattttggctttcttcgcttttaccagatccgccattttggcttgtccggtcagcacggcgtgcagatcttcacggctgatgtagaaagaggcgtcggcttgcggttgcagcgttttccggtagttaagcacgctatcgttcagcgtcaggttgaggttatcgccgttgctcatattgaagttcaggctgatatttttacccgcagctttcgcgctatcgaggcgaacggccataaagtcgaacagcatttcgaccgacatcccgcgaatggtgtccggggaaccggtggtgccgtggctgaacttatgcaccccttcgcgcagctctttcgcgccggtcaggtagaaaccgcgccatgtggcggactcggcctgatagcccagctgttcaaagttattcgcttgcagattcttcgcgacctggtcacccgggttggcggcaatcacctgtttcagcagttctgccgaccagcggtaatcaccttgcttgttcgcttcttgcgccaggttgatgacacgggcagaaccgcccagcgcctgcacgtaacgtttacccatctccacctgaccatacggatgcaggttagccgggttaccgtcgtaatagccaagatagaagttatacaccgcgcgggcgttgtggctgacagaaccgtaatagccgcggctggcccagttattggcaagtgcaggcggcagcttaatcatgtcgccgatttcattcatggtgtagccctggttcgccaggtgcagggtctggtcgtgaatgtacttgatggtatcgcggtatttaccaatataatcattgatatgcttattgccccagaccggccaggtgtgcggcataaacagcacttccgcgtcgttaccccacatatccagcgtttcgttcagatactcggtccacttgctggtgtcgcgggttttcgcgccgcgcagagtgtagaagttgtgcagggtatgcgtggcgttctcggcggtacacagggctttcagggccggaatatagaagtgcatttcggctggcgcttcgctacctggggtcatcaggaagtcaaactccaggccgtcgataatcatcttctcgccagttctgacgatagttttcgtcggtgcaataatgctcgggtcgcccgttgccagcgtcacgccaaggccattacccacattgccttgcgcgttgtgcggcagtaacagaccgtaagagtagagcgcacggcggctcatgatgttacccgccagcacgttttcgctgatggcttcgtccataaagcctgcaggggcaatcacctgaactttgccggatttaacatcggcttcagagataatgcctttcacgccaccatagtggtcggtgtggctgtgagtgtagataacggcaacaatcggtttttgcggacgatgctggaagtaaaggtcaagtgcggcttttgcggcaggcggcgtcaccagcgggtcgataacaataatgcctttctcgccctcaacgaacgtaatgttagagatatcctggccgcgcacctgatacattttatcggtgactttgaacaggccagaaataccgttgatttgcgactgacgccacaggctggggtttacggtttccggcgctgcggcattaatatcaaatttgtaatcgtccgcgcggtagtaaactttaccgttcgcatcacgcagaataccttcatccagcagcggggcgataaatccacgctgggcatcgtcaaaatcctgacgatcgctaaacggtaatgatttggcgtaattctgattaacctgttgggtatattgagtggcggctttcgcttcctctttcgcgttagcggtatttaccatcatgccgctggcggcagttaacgcaataacaatcctgctcaaacggaataaccgagagttattcatataaatctccatttatcatttatgtcgtaaatatgtaatccatgcaaaatacgtcatttaaagctggcgttatcataattgggaaattgcgactttaataagtggaagtgtgagcggaacgcgccattttattaggcatttgtgctgaagagggaaaattacagtaaaactatcattgcagaaaataatatgagtcgttttatgtgtttattatatatattgtacctgtcgttggcacagcgggacattgcgctactgtgccaacgttttactcatggggctttagcacagaactgtggcaaaaaacgttgatgcgccaatattgctgcaccctgagcgccattaaagtcagaagatgaggcggcaataaagcgcacgacctgatgcggcagtggacggcgcaggtacttttgggtcatggcaacgagagtctcgcgtgggaaggcgggcatatccatcacgccaccgcccaggatcaccgcatcgggatcgaacagattaatgctggtggcaatggcccgtgccgcgttttcaagcagactctggacgaaaggggcgttttccgcatggacgaaaagatcgcgcaatgggtaatttcggggctgttgttcgtaccagcgtcttagcgccattccagagcaattggtttccaggcacccaggattgccacacgcgcagtgttgggtcatatctcccagggggatatgacccagttcgcctgccacaccgtgtgcacccgtccacggcgcaccgttcatccacactgcgaaccccatccccgtaccgagataggccgccagaaccagttgttgcgtaaggcggttttctactacgtcccaggagagttgcaggttaacgtcgcgggaaaactcaaccggacaattcagcgtattttcgagcttatcggcgagatcatataaatccgccgctgttaacggcaggttaggcgtagaaataatggtgcgtttatctttactgaccagcgccggaaatcccatcaccagaccatgacagcgagcgttaaagcgcctgagttgctcgtcaatcatttcgccgatacccgacaccaggccgggagcaatgacttctgcggtccgctttttttcgcagtgtagcgtttcaccttctgctgtccgcagacaaaagcggatatgcgttgcccccatatccacgcccgctacgacgttatgctgtttttgcatgaggctgtacctcgctttttgcagccagaatctgcgcggtcataattctccatgcttcgtcgatattttccgcatgattaaacaggccggaagtgccgacgataaagacatccgcccctgccgccatcagtttttcgtaagttgcctggttgcaggaaccgtccacctcaatttcgtactccagaccttctcgttcacgccatgccttcagttcggcaagtttatccagcatttcaggaatgaacggttgtccggcaaagccgggatcgacagtcatgaccgtaattttatcggccttatggatatagtatttcatggcctcaactggcgtctccgggttaaggatcagccccactttcatgtcatgacggcggatttcatcaatcaggcggaacgcctggccgttgatggtttccggatgcagagtgatgaaatctgctcccgcacgcgccagttgagcaatgtaatcctgcggccgcgtcaccatcagatgacagtcgagcggtttagttgccagttttttaacctgacttacgaagaacggtgagagtgtcagattggggacaaagtgaccgtccatgatatcgatgtggaagtaatcggcatggctgtcgataaattcgatctgttctttaaatttcagcagatccatacacattaacgagggggagattttcatgttcaattccttacttactgataagacggtcaagggcgacagccgcgataattaatccgcccatcaccaccagttggtaataggtttgtacctgcaaaatattcagaccgttgttgatggtgccgatgatcaacccgccaatcaccacagagaaaatgcgccccttgccgccgaagaaactggtgccgccaatgatggcgctggcaatggcataggtttcaaaacccataccggcaagcggttctgcggcaccgagtcgtgcagttgagacgacgcctgccagacctgcacaaacaccggagatgataaacaccaccaggatgtggaatttcacgtcaatcccggaatagaacgccgaatttttgttgccgcccagtgcgtagatgttgcgcccgagccgcatacgcgttgtcagaaaccaaaggatgagcgcgacaattagtgagaagataacggggacaggtatcccaattacgctggcggcaaagaagttcacgaagtcaaatgagaagccgtataccgagttggcatcggagatcaccagcgtgatcccacggaaaatcgcgttggtgccaagggtgatgatgaacgggtgtagccccgtccagttgaccaggcagccgttgatcgcccccagtgcgccgccaaccagtacaccgccaatcatcgctgcgagaaacgggtcaacacctgccaacatcagtttggcggtcaccataccggaaagcgccagaatcgcgccaaccgagaggtcgataccagcgaccaggatagcgaaaaactcgcccatgccgatcaataccgtcacggagctttgaacaaaaatctgggtaatattattggtggtcagaaaatattctggtgacagcgaaccaaagatggcgacgatgatcgccaggataaaaaaggtgccgtatttatcccagaacagcgcaaagttgaacggtttcttctcgctcgcttcgctttttactcttgtggtaaagcccatgccataatctcctcttcgctcatgtcatcgcgattcgtcaggatttgcgtcagtcgtccttcgcagaacacggcgatgcggtcgcagacggtgataatttcaggtagttcagatgacaccatcaggatgacttttccgtcgtccgccagttggcgcatcactttgtaaatttcggctttcgcgccaacgtcgatgccgcgggtaggttcatcgaaaataatcacttccgggcaacagcacagccatttggagatcaggactttctgctgatttcccccggagagttcggtgatattctggtttaccgaatgacatttcagcgccagcagttcgcgttgattttcagcggtacgttgctcgtcaacttcatgaaacaagcccatcgcgcctttatagccgccgtctttcagactgcggctgatcgccatgttctgagcgatggaaaagttggggaaaaaaccgttatcccggcggctttcagtgatgtaagccatcccttttttcacggcatccaggggtgaacgtggagagatatctttgccattaagacggatttctccgccagcgcgtttatccacgccaaacagacaattcatcagttcagtacgtccggaaccgaccagtccggcaaagcctaatatttctccccggcagacgctaaatgagatatcccggaccttttttctgtcacgactggtgacgttccgcacctcaaaaaccgtttcgtgcgcaaggttgctgacattctccttcatcgcgttaaaacggttttgcagttcgcggcctaccatcagacggacgatatcgtcatttgacacatcgcttactatgccgctgcaaacgctgctgccgtctttcatcaccgtatagcggtcgcaaatacggcgaatttccgccaacttatgcgagatatagacgatggccgtaccctctttacgcaactgattcatgatcagaaacagatagtccacctctttattggtgagtgaggaggtgggttcatccatgatgatgactttggcatcgagcatcagcgttttggcaatttctagcatctgcttgtggctgatagataaattcgccactttctcatctagatcaactttcaagcccacgcgtaataacatcatggcggcgcggacacgcatttctcgccagtcgataatattgacgccacagatttttttcgtcagatgacgaccaatatataaattttccagtacggttaattcatcaataacgctgagttcctgataaataatcccgataccgagttgtgccgctaatttatgatccagcttgttatagctaatgttattaatggtaatggtgcctttggtcggctcatgtattccggataaaactttcattagcgtggatttacccgcgccattttctcctagtaatgcatgtatttcaccaggataaaccgttaaattaaccgactttaatgcgtgaaccggaccaaaggacttgccgatccccgccatcgatatatatggcgtggccataaataacctctctgcacgaaatatcgtattattgcctgatggctacatttatcaggtctacgttcaggttattttgttggccggataagacacttcattagcatcatcatccggcatcattcagttttattgagtgaccaggattgaatcgaccagtttaaattccggtgctttatccagcgggataaccttgccggatttctcagcgtcaaccatcagcttcagacccgttgcgccgatatccgccgggttctgggcaaccgtcgcggtcatttgtccggcttccaccattttgcgggcttccggaatgccatctgtaccgacgaccagcacttttcccgtttttccggcgtttgcgactgcctgagcaacacccattgccatcgtgtcattcgcgcaatagatcgctttaatattcggattacgttgcaacacgttagtggcgacatccagtgctttaatgcggtcccagtcggcaggctggctggcgacaagcttgatctggcttgcttttttgaaggcttcggtggcaccattacgacgcgcttcaccggaggcgttaccggctttaccctcaatgattgcgacttcaccaccttcagcgcccaatttgtcaataatgaacgacgcgcctttcgccccgacagcaacgttatcggtggtgacaaaagcttccacattgccgccagcttttttcagattatccatgtcgattttttcatcgagattaaccagataaatgccttttttccatgcgcgggcgacaggcatgaccagattcactgaggataatggagcgaaggcgatacctttgtaatttttattactgagatcttcaaataactgcaattgagattgaaaatcgccttctgaaggagaggcaaaaatatcaacgctgacgcccagtgtttttgcttcatcttcaatgccttttttcatatctacccaaaatgggttggagagggttttcaatacgacagcatattcggcggcagcaaaagcgctggttgacaacattaagcccacgagtgtgccgctgaaatatttcagatatttattcataataatgttctcacggtaaggggacaggtaactccgcgatggcggaattacctttttcttatttcagcgcgcctggtgagaagaaatcaacaattgcgccggttttttgcatattaatattagcttgttcaatgttgagctgggcgacagagacaaaaaaagcgtccagcaaagttagttgtaatattcttgccgaggcattacgacctaataacggcgtttccggggctggtgagcaaataatataatcggccagtttcgctatcggtgaatggtagctatgggttatacaaataatctttgccccgttcttttttgccagttctacggccgcttttacatcactggttcgcccggaatgggtcactaccagcacaacatctccttcctgtaacaacgaagcggacatcatcatgatgtgagcatcaggataggcctgacagcgtacgccaatgcgcaagaacttgtgctgtacatcagcacagatagcatttgatcctccggcaccgtacaaatcccgctgtctggcctgatagaaaaagcgggcggcacggtggatctcatcaacgttgacgatcgactgaccttccataatggtgcgtaaagtgatgttaaataccttattcaccacatcctgcggcgcttcatcaaaagccaactcggaaggcaatacctgttctgactgagaaaaataatcttccagcgcactgcgtaagttacgaaagccgctaaaccccagcagctttgataccttaactatcatcgcttcagataccgccagagcttctgcgacatctttaattgcgggtgcacaactcaggttaccgggtttgagtaaccactccacgatgcggctttcattttctgtcattccttcctgcttcattcgcaggtaaggcgctaaccctataccgttcggaagcgctgaatcaaactctgactggctcatcacgttctcttgtccttgaattgaagacgccactatatcaccacagcaagaacagaaaagatgctggcgacttcacaaaaaaataaaatttataaagtttattttattgtgaacaatggcgagtggcttaaaattttatttcatttaattagtttaaaaacatgatgttatttgtttttctggttttttagatgatagatgttgctggatggtgagtgtctttaacgctattgcgctgtcagatgtaactctgtaaaacagatcaggaaggcgtaattcatcgattttgggtgtttttaattcattaacatcacaaatgttttttgattgtgaagttttgcacggacggggaagatgaatgaaaaagattgcatttggctgtgatcatgtcggtttcattttaaaacatgaaatagtggcacatttagttgagcgtggcgttgaagtgattgataaaggaacctggtcgtcagagcgtactgattatccacattacgccagtcaagtcgcactggctgttgctggcggagaggttgatggcgggattttgatttgtggtactggcgtcggtatttcgatagcggcgaacaagtttgccggaattcgcgcggtcgtctgtagcgaaccttattccgcgcaactttcgcggcagcataacgacaccaacgtgctggcttttggttcacgagtggttggcctcgaactggcaaaaatgattgtggatgcgtggctgggcgcacagtacgaaggcggtcgtcatcaacaacgcgtggaggcgattacggcaatagagcagcggagaaattgagattcatccactacttgcatggatgagtaatgattaatgtggatagagtttctttttgaggttggctaatgaaacgctttccgctatttcttttattcaccctgctcacgctgtccaccgttccggcccaggccgatattatcgacgacaccattggcaatattcagcaggcgattaatgacgcttataaccctgaccgtgggcgagactatgaagattcgcgcgacgacggctggcagcgtgaagtgagcgacgatcggcgcagacaatatgacgaccgccgccgccagtttgaagatcgccgcaggcagctggacgatcgccagcgccagcttgatcaggagcgtcggcaactggaggatgaagagcggagaatggaagatgagtatgggcgatgaggttgggtatggagcaggcatcgcccctcaccccaatggggagagggagaaaacgagcgcaatattcaatatcgagcacaatcggtcccctcgcccctctggggagagggttagggtgagggggccagcgcgcacattccctctcatcacgccaccccaatctccatcccatcaaaccccacctcaaaccctgacggtagtgcgttttccatcagccacgcatcaaactggtggctgatatgggtcagaatcacccgtggcgagcggataacctgattcagcgcaagcacggtatttaaatcacagtgattacgcggtgcatccgcgcgcggcgggtgactgcaatccatcaccattacctgcggctgattattgcgtaaaaatttcagcgttttttccggcaagcctgcggtgtcagacagccacgccacccggctgtgtgccgtttccagcagataaccgaaggtcagttttgagtggttgagcggcaggggcgtgacctgtaacccctgcaaatcaaacaccacaaacggttccaccgtgtggctgaaatcaagcaggcccggatgtttaaacagatcgtcgcagccctgttcatccggcgggccgtaaaccgggatcggatcgccaacgccccagcgcagcggaaacagcccctggacgtgatccatatgataatgcgtcagcaaaaactgctggaacgatccgggcgaccagcgatcggcgagatcgtgcagcccggcgtcgatcagggtgattgcgtcgttaaacttcactacgccgctgcacggttggcggcgatactgcggcgagcgccgcgctctggcgcaggccgcacactcgcagccccatgccggaacgccctgtgcgccgccggtgccggtgagcgtgagggtcaggctcatgttacagcgccttggtgaagcggaagtggctctgctcgtagccttcgcgcagatagaaacggtgcgcgtcgtggcgcttcacgttggtcgaaagttcggtcatttcggccccggcctggcgggcttcttcttctgcccacgccagtaacttactgccgacgttcagaccgcgcgcctgcggcattaccaccaactcctgaatttcgccgatccagttgacatgatgcagatgaaactgcaaatgcaggccgatcatgccgacaacttcgccatcaagcagcgccagatggtagcgcatgtttgggtcgcgcagattggcgttaaaacccacgcgaaacgcgtggtggtcaaactccgcctgttttagctcacaaatcagcgcgtaaaccgcgtcggtgtcgtactgcgtggccgggcgaagctcacaagcaggcatggtgtttctccttctgatggatcagcgtcagcagcgtgtcgaccgactggcgcaggctgccgtcattgttgagcgtatggcaatcctgtggagtatagcgggcggcgcgcgccaggcgggcgttaatttcactggcgttttcacggccacggttttccaggcgctggcggaggatctccggcgaaacctgtaaacagacgggcagcagcgccgattgatagcgcgcccgcgcctgcggcagatgggcgcgtgagccgttgaccagcacgtcgaatccggcgtgcagccagagatcaatctcgacgccgacgccataatacagaccgttagcgtgccagcttaaggccaacagattttgccccgcgcgggtaaaaaactcctgctcgctcagggcgatatggttttcacttccggcgctggcatcgcgcgtgatgtagcgatgcgccaccagtaactgagtttgttcccgcaggcggagttccgccagcaggctgtctttcccggagccggacggccccattaaccaaatcagttttcccatcatcagaacacccttttaccctgacgccagacgtggtcgatatgaatatgattgtccttgcgatgcgccagcaccaggtcggcgcgtttgccctcgccaatcaccccgcgatcctggagattaagcgcctgcgctggatttttagtcaccagcttcaccgcctgcggcagcgtaaagcggttgctctggtcatcggcgacgcgaaatgccgcatcgagcaggctggcggggtagtagtcggaagagaggatatccagcaggccaagctgcgccagttcactggccgccacgttgccggagtgcgagccgccgcgcacaatattcggcgcgcccatcagcacgttcatgccatgcttgcgcgaggcttccgccgcttcgaacgtggtgggaaattcggcgatcacgctgccaagctggtgagattcagcaacgtgggcgtgggtggcgtcatcgtggctggcaagcgcaatttttcgcgcgcggcacagggcggcgatggattcgcgattcggctgcgaccagcgtgcggcgagcgccagttgctcttcttcgtactgctgcatctgcgcatcagtgagggagtatttgccctgataatattcgcgatacttctcgcggttggcgaactggcgctggcccggcgagtggtccatcagcgacaccagcgtcaccggctcgcgctgcaccagtttttcaaacagcggcagcgtggtgtgatgcggcagttcgcagcgcagatgcagacggtgctcggcgcggttgacgccgcgtttctgcgtctcttcgatggcgttgatcatcttctccagattctccagccgatcgccgccgtcgcgcacgtcgccaattgccacggcatccagtacggtggtgatgccgctcgccaccatcagcgcgtcgtggctgctcatcgccgagtgggcaggccagtcaactttcgggcgcggggtgaagaatttatccagattatcggtatgcagctcaatcagccccggcagcagccagccgccttcgccgtccatcgcctccggcaggcggctctggctttcggcaaaggcgcggatttcgccgttctgcacctccagcgaaccgcttaccacctcgttttccagcaccagcttaacgttattgataatcatgaagaggctcccattgggtgcaggcggtcggcgacgtcattacgtacagcttcgtcatggaagatgcctacgatggctgcgccacgggttttggcttcgcgaatcagttccaccaccgcggcgctgtttttggcgtccagcgaggcggtaggttcgtcaagcagcagaatggggtagtcgacgataaagccgcgggcgatgttgacgcgctgctgttcgccaccggaaaatgtcgatggtgccaggtgccacaggcgttccggcacgttcaggcgggtgagaagacgcgcggctttagcggcgcaggcttcacgcggaacgccggtatcgagcagcggctgcatcaccacttccagtgctgagatacgcgggatgacgcgcagaaactggctcacccagccgacggtggttttgcggatttccaccactttgcgcgctggcgcggtgaccaggtctacccactcgtcaccgtgtttgatctggatttgaccttcgtcgggcagatagttggcgtacagcgagcgtagcagagttgatttgccgctgccggaatggccgtggagcaccacgcattcgcccgcgttgacggtgagcgaggcgcgattgaggacgggcaggcgcacgccgttttgctggtgcaggatgaaggttttactgacgttttgtacgttaatcatttttcgcctcgtggttcgggtgtcggatgcgacgctgacgcgtcttatccgacctacggggagcgcatttgtaggccggataaggcgtttacgccgcatccggcaccggctcaattctgcaaaaccgatgacaccagcagctgtgtatacggatgatgcgggtcgtcgagcacgcggtcggttaacccactctccaccacttgcccctgcttcatcaccagcaaacggtccgccagcaggcgggcgacgcctaaatcatgggtgacaatcaccaccgcgaggttcagctccaccaccaggccgcgcagcaggtcgagcaggcgggcctgcaccgacacatccagcccgccggtcggttcatccataaacaccagcttcggatgcgtcaccaggttgcgggcaatctgcaaacgctgctgcataccgccggaaaaggtggtcggcaggtcgtcgatccggttggcgggaatctccacctcttccagccacttctgcgcggtggcacgaatatcgccgtaatgacgtgccccggtcgccatcagccgctcgccgatattgccgcctgccgacacctggcggcgcaggccgtcgagtggatgctgatgcaccacgccccattcggtacgcagcaggcgacggcggtcggcctcgctcattgcatacagcgaacggttctcgtagtgaatttccccctgctgcggcgtcaggcgcgcggagatcgacttcagcagcgtggtcttcccggagccggattccccgacaatgcccagcacttcccccggccataaatcaaaagagacatcgctaaagcctttgcccggcgcgtaaaggtgggtcaggttattgaccgaaagtaacggttgattcattggttttttgcctcgctctgttggcggcaataatcggtatcggagcagacaaacatgcggtttccggcgtcatccagcaccacttcatcaagatagctgtgggtcgatccgcagatggcgcatggctcatcccactgctgaacggtgaacgggtgatcgtcgaaatcgagactttccacgcgggtaaacggcggcaccgcatagatgcgcttctcgcgccccgcgccgaacagttgcagggcgggcatcatgtccatttttgggttatcgaatttcgggatcggcgacgggtccatcacgtagcgcccatttaccttcaccggataggcgtaggtggtggcgatatgaccgaagcgggcgatatcttcatacagtttcacctgcatcacgccgtactcttccagcgcgtgcatggtgcgggtttccgtttcgcgcggctcgataaagcgcagcggctcggggattggcacctggaagataattatctgatcttcggtcagcggcgtttcggggatgcggtgacgcgtctggataaccgtcgcatcgtccgtacgttccgtggtgtttaccccggtcacgcgcttgaagaagttgcgaatcgacacggcgttggtggtgtcatccgcgccctggtcaatcaccttcagcacgtcgctttcgccaatcacgctggcggtaagctgaatgccgccggttccccagccgtacggcatcggcatctcgcgcccgccaaacggcacctgataaccggggatcgccaccgcttttaagatggcgcggcggatcatgcgtttggtctgctcgtcgaggtaggcaaagttgtagccgctcagattagccatggttctgctcctgttgcagacgtttgagtagctccagttcggcctggaaatcgacgtagtgggggagtttgaggtgtgagacaaagcctgcggcttcgacgttgtcggcatgtgccagcacgaactcttcatcctgcgccgggcctgtcgcgtgctcgccgtactccggggcttgcagagcgcggtcgaccagcgccatcgccatcgctttgcgctcgctcatgccgaacaccagcccgtagccgcgcgtgaagtgcggcggctcacccggcgggtcgataaaaccgttaaccatttcacactcagtcatcagcagttcgccgacgttcaccgcaaatcccagctcttccggcacaatcgacacgtcgatatagccgctgcggatctcgcctgcgaacgggtgattgcgcccgtaaccgcgttgggtggagtaggccagcgccagcaaatagccttcgtcgccgcgcatcaactgctgcaaacgggaggagcgtgagcaggggtaaaccggcggcgtgcgggtgatgtcatccggctgtgcgccgctatcctcttcaaacttcgccagcccctgacgcgccagcaggctgaaaacgtgcggcgacggctgctgttcgctgtcggcggtggtcagcgtcggcgcttcgccgtttgccagcagggtaaaatcgagcaggcgatgggtgtagtcgtaggttgggccaagcagctggccgccgggaatgtctttataaacggcggagatacggcgttcgagacgcatcccggtggtgtcgagcggctcgcttaccgccagcttcgccaacgtggtgcggtaggcgcgcagcaggaaaatcgcttcaacgttatcgccgctggcctgtttcagcgccagcgccgccagttcgcggtcggcaatgccgccttcggtcatcacgcgatctaccgcgaggttaagctgctgttcaatctgggcgacgctcagttcgggcaaatcggtatcgcctcggcgtcggctctcttgcagggcgtgggcggcgtcgatcgccttctcgccccctttcacggcaacgtacatcagcacacctccacatgagtggttcgcggaatagccagcaggcgctcgccacaggtcaggatcaggtcgatgccgagcgggaacggatgcgggcgctcggtgagttcgtgcagaatgcactccggcagctgcggagcgatcattcgttcttcggcaatacccgcaccagtaaggcgcaacatgcgtccgccgctcaggctggcgacctgtaaaatcagcgtcgcacccgcttccggcgcaacggcggtgccggtggaaagggcgttgagctgttcgctggaaatcgcctcatccgtcaccgcgaaggtcgcctgttccggctggctgaccagcggcgcgttggtatgaaaacgcaggctctggttgacgatatcgttatttaatggggtagaaagccacaccggcgtgtcgttatcggccagcgtcagcagcacgctggtggtggcgatattcagcggttgccagccgcgtttgagctgatgcagggcgacaatcacgcccggctcgctcatggcctttaacaggcgacgaaaactgtgctgggcatcctgcacgggaagcataaaagcggtttccagggtcatgcgttgtctccgcgaaccatcgtaaagaagtcgacccggctggcgttcacttcggcctggcgtgcggcaatgcgtgccatacggtcagcgtccagcggggcaataagggtttctgataagttttgaaagtggcgagattgctgcatcagcgcgtcaatcagcgcgcagcgttcggcgtgctgtttatcacgcccctgcacccagctgtagccgagcgtgccgtcagtcaggcgcacggcggcgcgggtcagcgtggcgtcgccggcaaaaaaacgttcgccggtgccgcccatccgcgcctgaatctgtaccaggccagtttcagcggcgcggatcacctcatagtcggcggtgatgtttagcgcgttcaggcgtgctgccagttcagccggttggctgtgcgccagcacggacatccagtgctggcgggtcgcggtatctgcgtgcattcagtgctccatagtgaattcaatcatgtcggcgcgcgtcaggctgacggagtactccgccgggctgctttcaccgtcacggtggttaagggtgcgcacgcacagcagcggcgacatattcgggatttcaagacgctggcactctttggcctgggcgcggcgggcgctgatccgcgtctggctgcggcgcagcgcaattccggtttgctcgcgcagaaaatcgtgcagcgagccgctgtcgaagcgttgcagcgtcggccagagggtgaggtccgcgaagtagtggtcgattaaacagagcgcgacgccgttgacacgacgcagggtgcgcaggtggatgacgttctccccctcggtaatccccagtgcgtcagcgacgtggccggacgcggggcgcaataccgaaagcagtttttcgctggtgggatggctgccctgatccagcagattctggctaaaacgcgcctgggcgttgagcgggtaatcgaacgggcgcatcagcaccagcacgccgacgccctgacggcgctgtacccagcctttttccaccagttggtcgatggcgcggcgcagggtgtggcgattcacctcaaagcgcgctgccagttgctgctcggcgggaagatagtcgccgcagcggtagtgttgacgaagctcctgctcaagttttgcggctatctcttgatagcgtgttgggtagctggtcggatgtgtagacaagtgcatagatatcaatgcctcgcttatcagataaagtgcttacgcaaccgttgagagaggaaatccagcaggctgaccgtgacgatgataagcaccatcagggcgcaggtttgttggaactggaaaccgcgaatcgcttcccacagggtgacgccgatcccgcctgcgccgaccatgccgacgacggtcgccgagcggacgttggattcgaagcgatagagggagtaggagatcagcagtggcatcacctgtggcagcacgccgtagaggatctcttcgagcttgttggcaccggtggcgcgaatgccttccaccgggccgggctcaatcgcttccaccgcttcggaaagcagcttggagagcacgccggtggtgtggataaacagcgccagcacgccagcacgccagcgaacgggccgaggccgacggcgaccacgaacagcatggcgaagaccatttcgttaatggcgcggcaggcgtccatcaggcggcgaacgggctggtaaacccaccacggcaccaggttttcggcgctcatcaggccaaaggggatggagagaaccaccgccagcgcggtgccccagacggcgatttgcagcgtgacggccatttcggtgaggtaatcctgccactggctgaaatcgggcgggaagaagtcggcggcgaacgtcgccatgttgccgccgtctttgatcagcgtaagcggggccatttccgcgccctgccacgagacgaccaacacggcgagtacaacggcccagctcagaagcgagaaccagctgcgcttgggtggggcgatggtgatggtttgcatgtttggctccggtctgtaggccggataaggtgcttgcaccgcatccggcatcaacgcctgcacattgtcggatgcgacgccggggcgtcttatccgacctacgatttactgcaccgctttactcaccgaactcatcgcgcttagcgcgttgttcaggcggtccaggtcatccagctgcgcctgaatctcggtggtttttgccagcttgtcctgctcattcagtcctttattgcttttcacgccctgcatctctttaaacagcgcgagctggcgaatcggcaccagttgcaggtcgctggaagcgcggaatggcgcccagcccaggcgttccagcaccgctttttcttccggcgttttgccgtagttcataaagaagtcgtagatcttgtctttggtggtttcggaaagattcttgcgccagacgatcggatcgcctgggatcagcggcgacttccagatcaccttcagttctttcagcttctctggcgcggaggttttcagcttgtcgaggttttcggtgttgttggtggcaacatccacctgcttgttggcgacggccagcgcgttggtttcatgcccggcgttgacggtgcgcttgaagtcgctggcggagatattgtttttggcgaagacgtagtagccggggacgaggaagccagaggtggagttaggatcgccattgccaaaggtgagatctttccgcttcgccagcagatcgttcaggttgttgatcggactgtctttgttgacgatcaacacgctccagtaacccggcgatccatccgccgcgaccgtctgggcgaagacctggccattggcgcgatccaccgcttccatcgccgacagattgccgtaccaggcgatatccactttattgaagcgcatcccctggataatgcccgcgtagtccggggcaaagaaggcgttgaccttcacgcccagcttcttctccatatcctgcaagaacggcgtccattgcggtttcaggttttgctgtgattccgttgaaataatgccgaaattcaacgccttttcctgctcttcggcgtgcgccgggcttaacagggtgctgaggctgaacatgctggtgaaggccagcgaggcaattatcttagcgttcattcgttttcctcaatgatggggatgtcaggcagctttcgcgttctcttcgacgcggttaatgctgcggtagagatggtcaaaacgttcgttatcaaactgttggctgctgccgtcgtagaagacgtgcccctggcgcagggcgacgatgcgttcgcagtagcgcagggcgtaatccacctgatgcagcgtgacgaccacggtgatgccgtcgttctggttgatgtcgcgcagggtgtccatcacgatgcgcgctgattctgggtccagcgaggcgatgggttcatcggccagaatcactttcgcctgctgcatcagcgcacgggcaatcgccacacgttgctgctggccgccggagagggtggaaacgcgctgatgggcaaaatgcaccatgccaacgcgggtcagcgcctgtaacgcgcgctgtttctgctcgccggtgaaccagctaaaacaggtgcgccagaacggcgtgctgccgagcgcgccaatcagcacgttctccagtacgctcaggcggttcaccaggttgaattgttggaatatgtagccggtatgggcgcggcttttgcggatatcgcgggccaggcggccttcgcgctggactgtgcggcccagcagctcgatatggctaccgacagatttatcgccggtaatcaaaccgcttaagtgacgtaaaagggtggattttccggaacccgacggcccaagcagagccaccatttcaccgtgatgaatgttcagatcaaccgcatgcagcgcctgatgctgattgaaggttttggcgagcttctcgacacggataatcgtttgcatgatgcagcctccctaaaaaagtggctccatcgtggcggattattgtgacgatttggttaattaaaagtgactaacagatgaagagttaacgggaattcgatgacagtgcgggagggcgggcctcccggcgggttattgcgttggttgttgtttgacgacattaatcatccacggtacgccaaatttatcggtgactttgccaaagccatgcgcccagaaagtttcctgccaggccatttcgatttttccgttagcggcaagattgtcaaaccagcgttttccttcttcgacctgttgcgaatcgagcaccagcgtaaagccggagtagctggcttttcctgacggcatggcatcgctcatcatgatgtcgcttccggcaatgcgcacattggcgtgggcgatggcggtatcgggaaattgcattccggaagggcagttctcggcgctgtcctgcgctgattttggcatttcgccgaagctgattttatagagcagttccgcgcccaacgtacgttgataataggcaatcgcgtcggaacagttaccggcaaaagagaggtagggacttaacggcatgatggtgacctcagttaagagaagccagttaagtgtagttcgaaatttatacagatgagaggcggcctgataagacgcgcgagcgtcgcatcaggcagtcggcactgttgccggatgcggcgtaaacgccttatccggcctacggagggtgcgggaatttgtaggcctgataagacgcgcaagcgtcgcatcaggcagtcggcaccattgccggatgcggcgtaaacgccttatccggcctacggagggtgcgggaatttgtaggcctgataagacgcgcaagcgtcgcatcaggcagtcggcaccgttgccggatgcggcgtaaacgccttatccggcctacggatggtgcgggaatttgtaggcctgataagacgcgcaagcgtcgcatcaggcagttggcactgttgccggatgcggcgtaaacgccttatccggcctacggagggtgcgggaatttgtaggcctgataagacgcgcaagcgtcgcatcaggcagtcggcaccgttgccggatgcggcgtaaacgccttatccggcctacggagggtgcgggaatttgtaggcctgataagacgcgcaagcgtcgcatcaggcatctggcaccgttgccggatgcggcgcgagcgccttatccggcttaccgatcacaatacaatcagttctttttcacaaactcagatttcagtttcatcggaccaaaaccgtcgattttgcaatcgatgttatggtcgccttcaaccaggcggatgtttttcactttggtgccaattttcagcatcgaagagctacctttcaccttcagatctttaatgatggtaacgctgtcgccgtcagccagcagattgccgttagcatctttaacgatcagctcgtcgctttcctgtgcaggttctgcgtcgttccattcgtaggcacattccgggcagatgtacatgccgttatcttcgtaggtgtattcggagttgcattttgggcagtgtggtaatgacatgtggatttcctcaaaagtcagcagggcaaaagcgccaaaaaacggcagattgccgaaaaaggccgcaattatacacaaaatccctgagtttgtcgggggtactgctgattttagacgacgatcgttttcatttgaaaggaaacgcaaaaagaaaataatctttttgcctctatttattatttaagataatgttaatgctctacttgttctttttttaattcacatgatatttttatctttctgacgttttaaacgtatcagaagacgttatttattctgataaaaaacaacacactaaatataaaattatttcttgcagtaattataaaagccgaaaacagaactcaaaaacaatctggctaaataaaataacaaaatttgctttaaggaagaattttctatgtacacacagaccctgtatgagttaagtcaggaggctgaacgcctgttacagctttctcgccaacagttgcagttactggaaaaaatgcctctctctgtacccggagacgacgcgccacaactggctttaccctggagtcagcctaatatcgccgaacgtcacgcgatgctgaataatgagttgcgtaaaatttcccgactggaaatggtgcttgcaattgtcggtaccatgaaagcagggaaatcaaccaccattaatgccattgttggtacggaggttctgcctaatcgtaatcgcccaatgactgcgctgccgacgcttattcgccatacgcccgggcaaaaggaaccggtactgcatttttcacatgtcgcgccaatcgattgtttaattcaacaattacaacagcgcctgcgtgattgcgatattaagcatctgaccgatgtgctggaaatagataaagatatgcgtgcgcttatgcagcggatcgaaaatggcgtcgctttcgaaaaatattatctgggtgcccagcctatttttcattgtctgaaaagtttgaatgatttagtgcgactggcgaaggcgctggacgtcgattttcctttttctgcttacgccgccattgagcatattcccgtgattgaagtggagtttgtccatctagcggggctggagagttatcccggtcagttgacgttactggatacccccgggccaaatgaagccgggcaaccgcatctgcaaaaaatgcttaaccagcagctggcacgcgcctcggcggtactggcggtgctggattatacgcaactgaaatcgatctccgatgaagaggtccgtgaggcgattttggcggtggggcaatcggtgccgctgtacgtgctggtcaataagttcgatcaacaggatcgtaacagtgacgacgccgaccaggtgcgggcactgatttccgggacgctgatgaaaggctgtattacgccacagcagatatttccggtgtcgtcgatgtggggctacctggcgaatcgggcgcgctatgagttagccaacaacggtaagttaccaccgccagagcaacaacgctgggtggaagattttgcccatgccgcgcttggcaggcgctggcgtcatgccgatctggcggacctcgaacatattcgtcatgctgccgatcagttgtgggaagattcgctgttcgcccagccaattcaggcgttgcttcatgccgcttacgctaacgcctcgttgtatgctctgcgatctgccgcgcataaactgttgaattacgcgcagcaggcgcgggaatacctggattttcgtgcgcacgggttaaacgtcgcttgtgaacaattgcggcaaaatatccaccagatcgaagaaagtttgcagctattgcaactcaatcaggcgcaggtgagcggcgagattaaacatgaaatcgagctggccctgacctccgccaaccactttctgcgtcaacagcaagatgcgctgaaggtgcagttagccgccttgtttcaggatgattcggagccgttaagcgagattcgtacccgctgtgagacactgttacagacggcgcagaacaccatcagtcgcgactttacgctgcgttttgccgagcttgaatccaccctttgccgggtgttaaccgatgttattcgccccattgagcaacaagtcaaaatggaattgagcgagtcagggtttcgtcctgggtttcattttcctgtttttcacggcgtagttccccacttcaacactcgccagctgttcagtgaagtcatttcgcgccaggaagcaacggacgagcagagcacgcgtttaggcgttgtgcgtgagactttttcgcgctggttgaatcagcccgactggggacggggaaatgagaaatcaccgacagaaacggttgattacagtgtgttgcaacgagcattaagcgcagaagtcgatctctattgccaacaaatggctaaagttctggcagagcaggtcgatgaatctgttacggcaggcatgaatacttttttcgctgagttcgcttcatgtttgacggaattacagacgcgtttacgcgaaagtctggctctgcgtcaacaaaatgaatcggtggtcaggctgatgcagcagcaattgcagcagactgtgatgactcacggctggatttacaccgacgcccagctgttacgcgatgatattcaaacacttttcacggcagaacgatattgaccaagacgttacttgacggccccggtcgcgtgctggagtcggtttatccccgctttttagtggatctggcgcagggtgatgatgcccgccttccacaagcccatcagcagcagtttcgtgaacgactgatgcaggaacttctttcgcgtgtgcagcttcagacatggacgaacggcggcatgttaaatgcgccgcttagcctgcgtctgacattggtggaaaaactggcgtcgatgctggatcccggtcatctggcactgacgcagatcgcgcagcatctggcgctgctgcaaaaaatggatcaccgccagcactctgctttcccggagctcccccagcaaattgccgccttgtatgagtggttttcagcccgttgtcgctggaaggaaaaggcgttaacgcaacgaggcctactggtgcaggcaggtgatcagagcgagcaaatttttacccgctggcgtgctggggcgtataacgcctggtcgttgcctgggcgctgttttatcgttctggaggagttgcgctggggggcatttggcgatgcctgccgtctgggaagcccgcaagcggtggcgttgttgctgggtgatttgctcgagaaagcgacacaacatctggcagagagtatcaatgcggcaccgaccacgcgtcactattaccatcagtggtttgcctcttcgaccgttccgacgggcggggagcatgctgattttttaagttggctgggaaagtggaccacggcagataaacaacccgtttgctggtcagtgacccaacgctggcaaactgtcgcgctggggatgccacgactctgttcagcgcagcgtctggcgggggcaatgctcgaggaaatcttctctgtaaatttggcgtaaataatcagttacatcaatgagtcctaaacgaaatccatgtgtgaagttgatcacaaatttaaacactggtagggtaaaaaggtcattaactgcccaattcaggcgtcaactggtttgattgtacattccttaaccggagggtgtaagcaaacccgctacgcttgttacagagattgcatcctgcaattcccgctccccttttgcggccgtcgcgctgatttttctggcgtttgcggaaatgggccaactctgcgaggaaagctatgctgaaaaggaaaaaagtaaaaccgattacccttcgtgatgtcaccattattgatgacggtaaactgcgtaaagccattaccgcagcatcactgggtaatgcaatggaatggttcgattttggtgtttatggttttgttgcttacgcattaggtaaagtttttttcccgggggctgaccccagcgtgcagatggttgctgcacttgccactttctccgttccctttctgattcgaccgcttggcggactcttctttggtatgttgggcgataaatatggtcgccagaagatcctcgctatcactattgtgattatgtcgatcagtacgttctgtattggcttaataccgtcctacgacacgattggtatttgggcaccgattctgctgttgatctgtaagatggcacaaggtttctcggtcggcggtgaatataccggggcgtcgatatttgttgcggaatactcccctgaccgtaaacgtggctttatgggcagctggctggacttcggttctattgccgggtttgtgctgggtgcgggcgtggtggtgttaatttcgaccattgtcggcgaagcgaacttcctcgattggggctggcgtattccgttctttatcgctctgccgttagggattatcgggctttacctgcgccatgcgctggaagagactccggcgttccagcagcatgtcgataaactggaacagggcgaccgtgaaggtttgcaggatggcccgaaagtctcgtttaaagagattgccactaaatactggcgcagcctgttgacatgtattggtctggtaattgccaccaacgtgacttactacatgttgctgacctatatgccgagttatttgtcgcataacctgcattactccgaagaccacggggtgctgattattatcgccattatgatcggtatgctgtttgtccagccggtgatgggcttgctgagtgaccgttttggccgtcgtccgtttgtgctacttggtagtgttgccctgtttgtgttggcgatcccggcgtttattctgattaacagtaacgtcatcggcctgatttttgccgggttactgatgctggcggtgatccttaactgctttacgggcgttatggcttctaccttgccagcgatgttcccgacgcatatccgttacagcgcgctggcggcggcatttaatatttcggtgctggttgccggtctgacgccaacgctggcggcctggctggtcgaaagctcgcagaatctgatgatgcctgcctattacctgatggtagtggcggtggttggtttaatcaccggcgtaaccatgaaagagacggcaaatcgtccgttgaaaggtgcgacaccggcggcgtcagatatacaggaagcgaaggaaattctcgtcgagcattacgataatatcgagcagaaaatcgatgatattgaccacgagattgccgatttgcaggcgaaacgtacccgcctggtgcagcaacatccgcgaattgatgaataagctgaaacggatggcctgatgtgacgctgtcttatcaggccaattgaactcttaaggttcacttaatctctgacgcgcatactctcctccaggttaacggaggagagtgcaatgaaaaaccgtgtttatgaaagtttaactaccgtgttcagcgtgctggtggtcagcagctttctttatatctggtttgccacgtactgatctttcttcagccgtacccaggcccgcgtgccggaagtctcttgccggttttgcaggaaaaactgcccgtgatgcaactgtgtaatgcggctgacaatacttaaccccagaccaatcccgccataacggctgtccatacgtacaaacgctttactcaactccccgcatttactctcatcaatacctggtccttcatcttcaactgccatgaccgctccgtcatcttcttgcagcttaatcataatgttgctgccttgcgggctgtaacgatgggcgttttctaccaggtttcgcaataacatccgcagcagggttgcatcaccctgaacggtgatgtcggcggcgctctctggcaatagcagggtttgctgtcgctggtcgagcatggtactgagttcgtcatacgaggggagaatgacatcttccagcagttttacatgttgataattaccggaagaaaatgactgtccggcacgcgccagttgcagcagctgggagacgctctccatcatctgatcaagccgtgccactaacggtgctacatcaatgtgatgcgttttcgccagcagttccagatgcaaacgcacccccgccagtggcgttcgcagttcgtgcgcgacgtcagcggtaaacaacctttcgttatccagcgtgctggtcaggcgactgaccagatcgtttaacgccgaaaccaccgcttcgatttcgagggtggcgctgtgaatggcaatgggcgttaagttgtcggcggtgcgcgcttccagctctttttgcagctccgccagcgggcgggtgatgcggcgtaccgcctgatagcagataaatagcgtcaggctgaccataaagacgccggggacaatcaggctggcgaccgcctcgcggatctcacgcatgatgtggcgatcgttgttgcgattgtcgcgtagcgcctgctcaaacagctgaatctgctcggtactttcatgccatagccagaagacgctgatcagctcaaacaccaacaaaatggccccgatggtcaatatcagccgttggcgcagcgatattggtcggcgcagaaaatgcatcagattcaattagttttcctcattcgcgaccagcatatagccaaagccgcgcacggtgcggatacgggctttgcccactttgtcgcgcagattgtggatatgcacttccagggtgttggtcgagggttcattgtcccagttatagatgtcgttgtagagaatttcccgatgcaccggactgcctgctttgagcattaaccgtgacagcagagcatattctttgggcgtcagaatcaactcttcaccgcccatccatacctgacggcgacccatgttcagcgtcagattgccaacaatcagctcactttcgccctgattattatggcgtcgtagcagggcgcggatacgggcatgtaactcttccagcgcaaaaggcttcaccagatagtcgtcggcaccgacatccagcccggcgattttgtcggtcagcgtatcgcgagcggtgaggatcagtaccggcagggtatattttttctgccggatacgggcgagaaaatgcagtccatcttcgtcgggtaaccctaaatccagtaccaccaggctgtaatgacctgcctcaaggctttgttccgccatccgcgcggttgtcacgctatcgcacgcgtagccttcggtttgcgccgccagaatcagtccctgcaataacagcgtatcgtcttcaacaatcagaattttcattcactcactctcctgcaagtttgcagaatatcatccgcagcctggtaatacttcgtctcaacgccagttaatcccaatagcgtggagaataaattgtcttgtgaatagtgttgcgtttgcgcctgtttttgcaggcagttctggtcaacctgataccgtttttgataatcctccgacagccacagcagcatcggcacctgtttttggctatccggggcgatggcataaggcagaccgtgcagatagatgccattttcacctaacgattcaccgtggtcagaaagataaaccaggctggtggtaaatttatcctgatgttctttcagcagattaatcgctttatcaacaatatagtcgacgtaaaccagcgtgttgtcgtaagtgttcaccagttgctctttggtacaggtctggatctcattggtgtcgcaggttggggtaaatttcctgaactgaggcggatagcggttgtaataggtcggaccgtggctgccgatggtgtgtaagacaatcacgccatcaccttgcaggttattgatgtactcttcaagcccgtggaacagcacttcgtcatagcattcgccgttgatgcactgatcaggtagattcagcgcggtgacgttctggtgaggcacgcggtcgcaggcacctttacagccgccatcgttgtcattccacagcacgttgatgcccgctcgctgaatgatatccagcacgccttcctggtgctgtgccagctcttctttgtagtgctcacgcggcatatccgagaacatgcacggtactgaaactgccgttgccgtgccgcaagatgcggtattagggaaatagaccacgttatctttcgccagccgcgggttagtttcacgcgggtagccgttgagggagaagttctccgcccgcgaggtttcgccgacaatcaggatggtcaaatttttacgtttttcgttctgcattaacgggttgcggtgcgcgtcttcaccaattcgcaccagcggcagatttgccagtcgctgatgggagtaccatgaccagctggcaacaatgctgttagaggggcttaaggatttcaccagctctttgttattgcggaacaacgaggcgtagtctttataaaacagtgcggcgaccagcaaaatcagtagtacagaaaccagaatattggctccacggaaaagaacactgcgcagacgcgaggtggcaggtttgatttttatccagcaggcaatcagcgcagcaagcacgccgctgaatcccagcgttaataacatttgcggtgtcatcagcgcataactttctgccggagtggtatcaataatattggcaatcatcgagcggtcgatgacgatgccgtaagtcattatgaaatattgtgcagccgcgccaaccagaataaacaggcaggccagtggtcgattaagccataagaaagagcttagtgtcaggacaatattaatcacgctgaaagcgacgaccggcatcgacaagaaaaccagtacgttatgcagcgaatccagcggcagcgcctgcaacacctgtttaaaaaaggcaatattcaggcagatagagatataaaaagcggccaacaatagccaggcgagtaaattcaaagagggtctttttagtaggcgcttcaacatcacggtgtttccatcgaacaaagtgcgcatatgctcgcaaagcaaaattaagccaaccttaagttcttaaggttggcttttatgtttgctggattaaggggaattaatctttgcttattggtgcatctaagggatacgggtttttatgtagccggttgtaattcagcgcatacatggcggtgatgaccatcagggtgacaaatgaccacataacctctttcgctccggaccccaccacggcccagatgcagtagaggaaggcaatggtagtaactgccagatatgccgggcgtgctttaccaaagtgaccgtgtccgagcagcagtaacgccgcacaggtgtaaagatatggcaccagtgtaaagatgaccgagacggaagaaaccagaccgaactctttggtcgcgtttggtgaaatgctgctgagctggaagatggtcatcaaaataccgacgataatcagccccgccactggcgtacccgctttatttacacgggcaaaaatcggtgggaacagtccgtcatcggcagcggctttcgccgtttgacccgccagcaacgtccagccgcccagtgaacctaagcaacccgcagctgcgcagaaggaaacaatggccccggcggtgtcacccaacgccatccgtgcggcatcaccgaatggcgaagcagaaacgcgcagtgcggcattagggatcatccccataatcgcggtggtagaaagtacatagcaaacggcggcaatcaataccccaccaatggtggcgatagggacattgcgtttcgggtttttcaccacacctgcggcaacggaggcactttccacaccgatgaacgaccacagcgtaacgttaagggtactttgaattgcaccgaaggtgcccaggccgctgacgttccatgccgccatataggtttcaccacggaaccagaaccagccaaatacggcaatcccgacgatggggatcagcgccagcacggtggcaactgcctgcacacgggtgatcattttcggaccgacaatgttcagcaggacgaagatccacagcaccacgacgcaggtgatggttaataccaatggatctttcagaatcgggaagaagtaacttaaatatcctacgccaatgaccaccatggcgatattgccgatccagcaggccagccagtagaggacgttggtttgataaccgagaaacgggccaaagcagcggcgggcgtaagcgtaagaaccaccaggacttgggtcgaggaacgacattttggcgtataccatcgagagccccagtgcaccgataatcgtcaccaaccatccataaatggcaatcccgccagtagaggccaggtttgcaggtaacagaaaaacacctgaccccataatattccccgacaccatcagggtgacggggattaagcccactttgtgagcatcagcatccgaagacataattaaactcctgcgaaggcgagcttcgtgacaataaattacgtcatatcatacgcctgcattcgatagttgaattattatcgaccgggttatcgctgatgccgttattaatatagctcttcgttaaggttaaaaatcaggcgacagtgcgttctctgtgctgactaacataatgcagcggcgtcataccgtagaagtctttaaagacagaaataaagtacgacgtactgttgtagccgcaggactgtgatacctgagagatatttttaccgtccatcattaattcatttacggcataacgcatgcggcaggtggtgattatttggctataactggtgttttcgcttttcaactttttttttaacagacttgggctaagacataaacaactggctaccatactaagattccagtctttgtgaatatcgctttcaataatttgataaacgctgtcacttacacaattacgtaacatatacatcattaatgaaacgaattttttactgtcgagaaaacgggatagcaccgtgaataataatgcgcgtgttcgttccttttctgactcagtttctgcgggcatcatgctgtgttgcgcggcaacgcgaaagacgtctggcgtcaggcatggcagggtgagtatgggcgtagcgctacgttgccatactggtatttgcgagagatctttattcagaaaccggaggtaatctttgatgatgtcgtgactaatatgagcaaccaaagtgttgttaagagaggagacgtcgataatattattttcacaatttaataacgccatatggttagctttaaggctaataggttctttcccattcacccttatccagacatctttttcagtcaataaaacaatacaaggttggtcgctgcaaatcctcatacatgtactcctgagtgcgaataaaagaccagttctcgctaaagcaaagcgataccgggaaatggttatataattgtatgatgaatataaacatgcataaaaataacgagttttactaatagtacaaatttttatagtaatttctcatgtacatatttttttacaggataaataacaggcaaaaaaaagcgcggggtggggccgcgcaaaaagtatgacatttttgtttgcagcaatttttatgaaaacgttgccatactcaaaaggcctaaggccaggcggcgtaatgttatttaaacaattacgccttcagcggaatagtggttacgctttcacgcacataacgtggtaaataccgtcaataatttcagtcccttcagtttcgtgttcaaatccagggaaatggtggtcccaggattgcagcgagcgtaaataacttacttgcggactgtttttatcgccgaagttttcaccagacagcagcatcgggattcctggcggatacgggataactgagtttgccgcgatgcgtcctggcagattttcaatggataccagttcgacattgttgtcgacaatcgcgttgtacgcttcacgcggggtgacttccgccaccggcaggccggaataggcttcgttcaaccgtgcgccagggttgttttctttcagccaggcaaacatggtgtcacccagatcgtgaatccccatgttcgcgtaagtgtcaggatattgttcaacaagttccggcatcacctgcgccagcggtgtgttggcgtcatagtggcgtttgaaggagcaaagggtgttaaccagagttccccatttcccacgggttacgcccatagagaacaggaacataatttggaagtcagtggtgcgggtaggtacaatgccgtggcgaccaagccaggcagtgaccagcgccgccggaacaccggtttcttccagttcaccatcttcacccattcccggagcaaggatgctgattttaatcgggtcgagcatactccagttatccggaatatctttgaagccgtgccagctttcgcccggatgcattacccagcagtcctgaacggtggtcagcagtttggttggtgcgtcagcaaagtcataggttttgccggtttgtgggtcggtgacgacttctttgttccacggtttgaagaaccagctaccgtcagcggtgaactctttatatagccgcgccatcgcctgacggaaatcaaccgcttcgtcaatcacttcctgtgtcagtgacaggccgctgttgccgtccatcatcgacaccgccacgtcgttggatgcgcagatggcatacagcggggaggtggtggcatgcatcatgtaggcctggttgaagcgggagaagttaatcgccccacgaccttcacgtacatgaatataagaagcctgtgacagcgcattcagcagtttgtgggtggagtgggtggcgaaaacggtaggaccgttgtgatcgccaggttcgccgcgcatggcatagtgatcggcatagatcgggttgaaacgtgcatagccgtaccaggcttcgtcaaagtgcagacgatcggaggttttttccagcagatcctgcgcttctttagcgttataacacacgccgtcataggtgcagttggtcaccacgcagtaagacggtttttgcccggctttgtctttggtcagcgggctttcactgattttcttctgcaaggtttcaggttgcatttcctgcggatagattggcccgataatgccgtagcggttgcggcttggcaccatatagaccggtttcgcgcctgtcagcatcaaaccttgttcgatggatttatggcagttacggtcaacgaccacgacatcgttatcggtcatgcaagcctgcatgatggtgcggttagagccggaagtaccgacgactaccgaccaggagcgatcggcaccaaatacgcgtgcggcatatttttcgctttcgccaaatgcgccagtatggtcaagcaaagaaccgagggaagttcgttcgatgcccatgtcggtgcggaacagattttcaccatagtagtcatggtagaaacgtccggcgggtgttttggtaaaaccaacgccgccctggtggcctggcgctgcccaggaatattcatggatgtcactatatttcatcagcgcgctgaacagtggcggcaacagctgctggcggtagcgggtcatcgcggcaacggcgcgtccggcgataaagtcggcggtatcttccagaatccaggcgaattcatcgacaagctccagcaggtcgcgatccattgcggcgagggctttttcccgatcgcccaacaggaagaccggcacgttttgttggcgctcatgaagcttaccgatcaattgtctgacgttttgatgttcgtccggatgttccatttgatagctgaacatcaggcagtcaatggcttcgtttgaagagagaatggcaaaaccatcatcaaaggaggtggatttaatcacggtaacattttgctggcttaaagcatctgccagacgctcaacggcgttaccgacccaggtgtcttgatggagaaactcgctttcaacaattaatactttcatcattgcttacccggttatgaaggaatcttcgttgcgggcaagtatcttccggccttttcgggctgtaaagcgcgtgaaaaacaaacatttttgaaatatttagttttataaacaatacgttatgtgattattttaaattattttcactgcttattatcgacggctaaactatttttttggctgatactgatatcgtctttagccgggaaacgtctggcggcgctgttggctaagtttgcggtattgttgcggcgacatgccgacatatttgccgaacgtgctgtaaaaacgactacttgaacgaaagcctgccgtcagggcaatatcgagaatacttttatcggtatcgctcagtaacgcgcgaacgtggttgatgcgcatcgcggtaatgtactgtttcatcgtcaattgcatgacccgctggaatatccccattgcatagttggcgttaagtttgacgtgctcagccacatcgttgatggtcagcgcctgatcatagttttcggcaataaagcccagcatctggctaacataaaattgcgcatggcgcgagacgctgtttttgtgtgtgcgcgaggttttattgaccagaatcggttcccagccagagaggctaaatcgcttgagcatcaggccaatttcatcaatggcgagctggcgaatttgctcgttcggactgtttaattcctgctgccagcggcgcacttcaaacgggctaagttgctgtgtggccagtgatttgatcaccatgccgtgagtgacgtggttaatcaggtctttatccagcggccaggagagaaacagatgcatcggcagattaaaaatcgccatgctctgacaggttccggtatctgttagttggtgcggtgtacaggcccagaacagcgtgatatgaccctgattgatattcactttttcattgttgatcaggtattccacatcgccatcgaaaggcacattcacttcgacctgaccatgccagtggctggtgggcatgatatgcggtgcgcgaaactcaatctccatccgctggtattccgaatacagcgacagcgggctgcgggtctgtttttcgtcgctgctgcacataaacgtatctgtattcatggatggctctctttcctggaatatcagaattatggcaggagtgagggaggatgactgcgagtgggagcacggttttcaccctcttcccagaggggcgaggggactctccgagtatcatgaggccgaaaactctgcttttcaggtaatttattcccataaactcagatttactgctgcttcacgcaggatctgagtttatgggaatgctcaacctggaagccggaggttttctgcagattcgcctgccatgatgaagttattcaagcaagccaggagatctgcatgatgtctgcacccaaaattacatttatcggcgctggttcgacgattttcgttaaaaatattcttggtgatgtgttccatcgcgaggcgctgaaaacggcgcatattgccctgatggacattgaccccacccgcctggaagagtcgcatattgtggtgcgtaagctgatggattcagcaggggccagcggcaaaatcacctgccacacccaacagaaagaagccttagaggatgccgattttgtcgtggtggcatttcagattggcggttatgaaccttgcacggtgactgatttcgaggtctgtaagcggcatggtctggaacaaaccattgccgatacgttggggccgggcggtattatgcgcgcgctacgtaccattccgcatctgtggcaaatttgcgaggacatgacggaagtctgccccgatgccaccatgctcaactatgttaacccaatggcgatgaatacctgggcgatgtatgcccgctatccgcatatcaaacaggtcgggctgtgccattcggtgcagggaacggcggaagagttggcgcgtgacctcaatatcgacccagctacgctgcgttaccgttgcgcaggtatcaaccatatggcgttttacctggagctggagcgcaaaaccgccgacggcagttatgtgaatctctacccggaactgctggcggcttatgaagcagggcaggcaccgaagccgaatattcatggcaatactcgctgccagaatattgtgcgctacgaaatgttcaaaaagctgggctatttcgtcacggaatcgtcagaacattttgctgagtacacaccgtggtttattaagccaggtcgtgaggatttgattgagcgttataaagtaccgctggatgagtacccgaaacgctgcgtcgagcagctggcgaactggcataaagagctggaggagtataaaaaagcctcccggattgatattaaaccgtcacgggaatatgccagcacaatcatgaacgctatctggactggcgagccgagtgtgatttacggcaacgtccgtaacgatggtttgattgataacctgccacaaggatgttgcgtggaagtagcctgtctggttgatgctaatggcattcagccgaccaaagtcggtacgctaccttcgcatctggccgccctgatgcaaaccaacatcaacgtacagacgctgctgaccgaagctattcttacggaaaatcgcgaccgtgtttaccacgccgcgatgatggacccgcatactgccgccgtgctgggcattgacgaaatatatgctcttgttgacgacctgattgccgcccacggcgactggctgccaggctggttgcaccgttaaaacgcgactaaacgctactgcgccgggggatttattccggcgcacacctctgacgataccaataacagaaggcgggcgttggtaacagcgacccgataccctatgagcatttcaatgactacaaaactcagttatggatttggagcgttcgggaaggattttgcgatcggcattgtgtatatgtacctcatgtattactacaccgatgtcgtcgggctgtctgtgggtttggtcggtactttgtttctggtggcgaggatctgggatgctattaacgatccgattatgggatggattgtaaatgctacgcgatcgcgatggggtaagttcaaaccctggatcctgatcggtacgttggcaaactctgtaatcttatttctcctctttagtgcgcatctgtttgaaggtactactcagattgtctttgtttgcgtgacctacatcctctggggcatgacttacaccattatggatattcccttctggtcgctggttccaaccatcacgctcgataaacgtgagcgcgaacaactggttccttatccgcgtttttttgccagtctggcaggctttgttacggcaggtgtgacgctaccatttgttaattatgtcggcggtggcgatcggggatttggctttcagatgttcactctggtactgatcgccttttttattgtttcaaccatcatcactctgcgcaatgtgcatgaagtcttttcgtcagacaatcaaccgtctgctgaaggaagccatctgacacttaaagccatcgttgcgctaatttataaaaacgatcagctttcatgcctcttgggtatggctcttgcttataatgtagccagcaacattattaccggctttgctatctattatttctcatatgttatcggtgatgcggatttgttcccctattatctgtcgtatgcgggagctgctaacctggtgacgttagtattcttcccacgcttagttaaatcattatcccgacgcattttatgggccggagcatctattcttccggtgttaagctgtggtgttctcctgttaatggcattaatgagctatcacaacgtcgtcctcattgtgattgcgggtattttgctgaatgtgggaacggcgcttttctgggtattacaggtcatcatggtggcagatatcgttgattacggtgaatataaactgcacgtacgctgtgaaagtatcgcttactccgtgcagactatggtggtgaagggcggttcagcctttgcggcttttttcattgcggttgtgttagggatgattggctatgtaccgaatgttgaacagtctacgcaagccctattaggtatgcagtttattatgattgctctaccaactctgtttttcatggtaacgctgattctctacttccgtttctatcgcctcaatggtgacacgctgcgcaggatccagatccatctgctggataaatatcgcaaagtaccgcccgagcctgttcatgctgatattccggtcggtgcagtgagtgatgtgaaagcctgacgtggacaatagctaacgaaaatggcctgatgcgatatgtttatcaggccacgtcttaatgtaatgctttggatttgcaaattttgtagaccggataaggaattcacgccgcatccggcatcaacaaagcgcaagttgttatccggttatcaagccaaagcgccgtagctggcggcaatgaaagcgagcgaggaatatcaccgtcgttaatgcgccaagcagcgcgcagaacatatcggattgcgtgtcccactggtcgccctgggtgccgagaaaatcatccgctccctgacccattgccagcgctgcccaccactcgattaattcatacatcgcgcttatcgccagcgccacgcagcagaccaggaacgccaccattttacgtccgcgcacgtacatcccgcgaacgagaatttctcgtgccaccagtgcaggcaccagcccctggaaaaagtgccccagcttgtcatacggattacgactcaaccccagccattcctgcacctcaaaaccaacggggactttcgcgtaggtgtattgtccgccgaccatcaggatgatggcgtgaaggaaaatgagcgtatagagcagcggcgttaacggataacgtctggcggtggcaagcagtagctgcacgacaataatcaccggtgtcacttccatcagccaggtgagtttgtcatgggccgaaatgccggtataaatcaggattaacgttagcgtcagtgcgctggtgttaagaattaacggcttgagtgtgcgggtcatggtgagttcgcaaatcagggaaaatactgactattcaccagcaagcgtgaaattacaatcgcaaaagaggtggccagggggatcacctggcagcatgctgccaggcgctgggccgaagaggttacttagtgcagttcgcgcactgtttgttgacgatttgctggaagaagtcgttacctttgtcatcgaccaggataaacgccgggaaatcttctacttcgattttccagatagcttccatacccagctccggataagcgacgcactccagatgcttgatgctctgctgcgccagtaccgccgccggaccgccgatgctaccgaggtagaagccgccgtgtttatgacacgcgtcggtaacctgctgactgcggttacctttcgccagcatgatcatgctgccgccgtgggattgcagcagatccacgtaggagtccatacggcctgcggtggttgggccaagtgaacctgatggataaccggcaggggttttcgccggacccgcgtagtagatcgggtgatctttgatgtactgcggaagttctttaccggcgtcaatcagctctttcagcttggcgtgtgcaatatctcggcccacgataatggtgccggtgagcgacaaacgagtggataccgggtattgcgaaagctgggcgaggatctctttcatcgggcggttaaggtcaactttcaccgcttcgccttcaccggcctggcgcagttcttgtggaatgtactggcctgggttgtgttccagtttttcgatccagataccttcgcggttgattttcgctttaatgttacggtcagcggagcaggagacgcccatgccgaccgggcaggatgcgccgtgacgtggcagacggataacgcgaatgtcgtgcgcgaagtatttaccgccaaactgcgcgccaagaccgagtttctgggcctcttccagcagttcctgttccagctggacatcgcggaacgcctgaccatgttcgttcccttccgtcggcagttcatcgtaatagtgagcgcttgctaacttgacggttttcaggttggtttccgcagacgtaccgccaatcacaaacgcgatatggtacggcgggcaggctgcagtaccgagggtacgcattttctcgacgaggaagtttttcagtttgccgggagtcagcagggctttggtttcctggtagagatacgttttgttggcagagccgccgcctttcgcaacgcaaaggaatttgtactcatcgccatctaccgcgtacaggtcgatttgcgcaggcaggttagtgccggtgttgacctctttgtacatgtccagcgccgcattctgtgaatagcgcaggttatcttcgatataggtgttatagacgcctttcgacagcgtttcttcatcaccgccgccggtccacacgcgctggccttttttaccgacgatgatcgcggtgccggtatcctggcaggtcggcagcacgcctttggcggcgatttcggagtttcttaagaattgcagcgccacgtacttgtcgttttcgctggcttctggatcgtgaagaatagccgcaacctgtttctggtgtgccgggcggagcataaaagaagcgtcgtgaaaggcttgctgcgccagcagggtcagggcttctggttccactttcaggatggtttcgccgtcgaagtcggcaacgctaacgtaatcggaagtgagtagatagtattcggtattgtctttccccatcgggaaaggtgcctggtagataaagggtttgtttgacatagcttccagcctgtaactctgtatttgttattcgaaaatggcgtgccgcgtagtcacgggcggcacgcaaagtgcatttataagaacccgtacatcgcggcgaagatccagccgaagacgcacgatacgctcacaccaatcaaccccggcagaataaagctgtggttgatgacgaagcgaccgatgtgggtggtgccggaacggtcaaactgaatcgctgccagatcgctcggataagtcggcaggatgtaataaccgtagcaagccggtgctgaagccacgatgtatgccggatcaacgccgatcgccagcgcgaccggaacaatcgccgccagcgccgcagcctgagagtttacaaacttggaaaccagcagcagaacaatggcataggcccacggatactctttcaccatttcacccagtacgccctgaatttcagacatatgcgcaccgaacatggtttctgccatccatgcgataccgtacaccgccacgatggcgatcataccggaacggaagacttcgttttttgagatagacgcgggattggttttggtcaggataataatcagcgccccggtcagcagcataaacatctgaataaccagtaccatcgacagcggtttgccgccgaaggatggacgcaggtccgaatcagcaccaagaagggcgactacagcgattgccccgaggaaaatccacattgccagccagttgcttttcggcagttttttatccagcagcgtcgcggtatcaccgtaaacatactcacggttttccggtacggagatgaatttctggaactcttcgtctttatccagatctttaccgcggaaccagctgaagataccgatcgccaggataccgattaacgtcgatggaatggtgattgccagcagatcgaggaactcaagatggcgaccatcaaaggtgacattacccagcatcgcaaccagagacacgaccgcaaccgacaccggactggcgataatccccatctgtgcaccgatagaacttgccgccatcggacgttccggacggatgttgttcttaatggcgacgtcgtagatgatcggcagaatggtgtaaaccacatgacccgtaccgcaaagaatggtcagtgtacaggtcacaaacggcgcgacaattgagacatatttcgggttgcggcgcagcagcttctcggcaatttgcagcatgacatcaagaccgcccgaagcttgcaaggtcgccgatgccgccaccaccgcaatgataaccagcatgacatcaactggtggtttacctggctgaaggtggaagacgaagaccagaatgaccagaccgataccgcctaataaacccagcgcgataccaccctttctggcaccataaaacagacatatcagtattatgataagttggatagtaaataacatgtgtgaaccctcgcgataatcctatttaaatttttgctgaatagatcacagtcacgttctgttttgtatgaactgttttcagagcctgactaaatatccgtttggtcgttaccggctttagcaaatacctcacagtgaatattggctgattaaagcagcggcaaatttatgcactgtgataagcggctttttcagagagaaagactctctggcgatgggtttatagtttgtactgcgcagatgttaatgttttgtttgctgttatcttattgatatttatcggtctattttttgttctcagggcagatgtcattaggtttatagattaatctgatctacccatttgtgggtaaaaatacacataatgcgggtgacataatagttaattaacttttgttagcgttttgaaattaaaaacaccgttcacctgaagagatattaatttttagcgatgatggagggataattatatttgatctggcacaagttttactgatgaaggatgtaacttgtgccaggggtattttgcattacggtaataattattacttacagataaccagcgatccgttattggcaatattgtttcagtagtgagtagtgttctgcctgaatacggtaacggtaaactggacgccccgtgacgccataatggatactggtgaacaagatgtggcagttgaccagccagatgaggtatttacggcaggaaacacgcgaaatgttaacctcgttggctagctcgtcggttgaaaattcatagtcctgatgcgcgtcaatccactggcacagtgtgcgtaacgtctgcggcgttaagccttttggcaagcgacgaggatcctgttcgttggagctgctgccgtggattagctgatcaagctcggcctggtcataatactgatgtttttccagcgccattttcttttgccgccagccggtgagcgcctcttcaaagcgggaagcctggaagggtttgatcaggtaatccacgacaccgtaatgcagcgaatctttaatggttgccgcatcggctgcggaggagatgacaatcacatcacttttgcaacgcgcgttatgcaggacaggcagtaaatcgagcccgttctctttttgcatatagatatcgagcaatatcaggtcgataggcgtatcgctattgaagataatctctttggctttctccagcgtcgaggctgttccacagcattgaaagcctgggatttgtgctacgtatcggcgattcagctctgcgaccattgcgtcgtcatcgataattaatacattgatcatctgttcgacctctccccgtcccagggtatctggacaaaaaattgtgtgaaaatcccgggttccgattccacggcgatgctgccgccgagattttctacctgttgtttgacaagtgctaaaccgacgcctcgctcgcttccttttgtcgagacacctttgtcaaaaatgtgatcgattttatcgggtgcgatccccggtccatcatcattaacttcacagtgcagccagccgtgacggtagtgcaatgttacgctaatttcgcctccgggttccggccctaatgcctccagcgcgttttctatcagatttcccaacgtggtaatcagcgtcgcgacctggtcctcactgccgctgtctggcagctggctttcactgtttaaaatcagcgtatggcctaaatcggtcgcgcggttaatcttgctgattaaaaaaccagcgataaccggagatttgatcttacccagcagagagccaatctcttcctgatagttattggctgttttgagaatgtaatcttccaactgcttataactcttcagatgcaataatccgagaatcacatgcaatttattcataaattcgtgggatcgttcacgaagtgcgtcagcatagttgaccagaccgtcgagtcgctgcatcagtttacgtacttcagttttgtccctgaaggttgaaatggcaccgatgataacgccattactgcgcaccggaacggtgttgatcagtaatagccggtctttaatcgtaatctcttcgtcgcggcgcggggtaccgtcgcgtaacacttccgagacatctaccacctgtgaccatgagtggcttagcgtcgacagtttctcatcgtcctgcgacttacggtaattcagcaattcttgtgcggcatcgttgatcagcgtgacctcgccgcgatcgtccacggcaacgacgccttctttgatagactgcaacatggcctggcgttgctcaaacagcgtggagatttcgtagggttccaggccgaaaaggatttttttcagtaccttaaccagaatgcaggtgccaatcagtccgaccagcatgccaaataataccgaccagataatgctccagcgactgtcattgatctgttgggtcacacggcttaactcaaggccgatcgccaccacgccaatttgtttatgattttcatcgtagatgggggtaaatacgcgtaaagcctgcgccagaaaaccgcgattgatagcgacattttcttcgccattcagcgctttaaggatgtcatcacctttaaatggctgaccaatacgctgggcttcaggatgcgagtagcgaagactttgcatatcggtaacgacaataaacagcagatcgttgcgtttgcgtacggcttccgcgatggcctggatgccactctcctgcggttttttctgcaagccctgacggatttccggcgagtcggcgagggtacgcgccactgccagtgccttgttggctagcccatctcgcgtcatatcactgatttgcgagaagtaaatcagatgcaccaccaatagcaccgagaacagtaccgcactgaccattaagatcactgtggtactcaatttcatcggacgtttgcgtaacatgcggtagggcaatgaatgtctcatcagcttccttgtgtgacaaatttcttaagcattatctctgatgaggcgggtaattcaaagggagtaagaatgattggctatataggggaagagactctggcaacggaaactgccagtgctgtatgaagattccggggctatgcttatagcgataatcatactgatgagagagggaaggtcatggatcaggcgctactggacgggggttatcgctgttataccggcgaaaagatcgatgtctatttcaacactgcgatatgtcagcattctggcaattgcgtacgtggcaacggcaagttatttaatctcaaacgaaagccgtggatcatgccggatgaagtcgacgtcgccactgtggttaaagtgattgatacgtgcccgagcggcgcgctgaaataccgtcataaataagcgagggtaaaatggaaatacgcgaaggccacaataaattttacattaatgacaaacaaggcaagcaaatcgctgaaattgtctttgtgccgaccggagagaatttagcgattatcgaacataccgatgtcgatgaaagcctgaaagggcaagggattggtaaacagctggttgcgaaagtcgtggaaaaaatgcgtcgggaaaaacgaaaaattatcccattatgcccatttgcgaaacatgaatttgataaaacgcgggagtatgatgatattcgcagttgatgggagagtacagagtcacgatatttttcattctctccgcgatgtgatgcaggagagcatctgaagggtagggggatgcacaaagaatgggcagagagcgcgtttttttgtcccaagtcatcccctttactgagcaaaaaaaagaatatctcctatatgagaatcatcaatcggggttaataagttttgcgtccccagagcgtttaatattgataggagtcatattatggaaggtaaaaacaagttcaatacttatgttgtttcttttgattatccatcatcttattcctcagtgttcttaagattaagatcattgatgtatgatatgaatttctcctctatcgtggctgatgaatatgggataccacgacaattgaatgaaaactccttcgcaataacgacatcgttagccgcaagtgaaatcgaagatttaatcaggctcaaatgcttagacttaccggatattgattttgacctcaacattatgacagttgatgactatttccgtcagttttacaagtagccaggaaggataagaagaacataaaaaatggcactattctctaaaatattaattttttatgtgattggtgtgaacatatcctttgtcattatctggtttatctcacatgagaaaacacatattcgtttacttagtgcattcctggtcggaataacctggccaatgagtctgcctgtggcattacttttttctctcttttaggagctgtagttgagtggacccgctggttatcgtgaaacgaagcgtctctcctcaaaactggatttgcggaacgatgaacgaagcagtcgcctgactgcttcgttcattaaagtgaaatttatttctgtgggcgcatcgccgggaagagaataacgtcgcgaatagtatggctgttagtaaacagcataatcattcggtcgataccaatacccagaccagcggttggcggcagaccatattccagcgcagtcacgtaatcttcgtcatagaacatggcttcgtcgtcacctgcagctttagcattaacctgttcctggaaacgttcagcctgatcttctgcgtcgtttaattcgctaaaaccattaccgatttcacgaccaccgatgaagaattcaaaacggtcggtgatttccgggttaacatcattacggcgtgccagcggggacacttctgccggatattccgtaataaaggttggctgaatcagatgtgcttctgccacttcatcaaagatctctgtgacaatacgtcccaacccccagcttttctctaccgtaataccgatagattcagctaatgctttagcagcatcaaaattatccaggtcggccatatcggtttctggacgatattttttgattgcttcgcgcatggtgagtttttcaaacggtttgccgaaatcaaacacatgctcgccataagtgactttagtggtacccagaacctcttgtgccagggtgcggaacagtgactctgtcagttcaatcaaatcgtggtaatccgcatacgccatgtagagttccatcattgtgaactcaggattatggcgaacagaaataccttcattacggaagttacggttgatttcgaatacccgttcaaaaccgcctacaaccagacgtttcagatacagctccggcgcgatacgcagatacatatctaaatccagagcattatgatgggtaataaacgggcgagcagatgccccacctggaattacctgcatcatcggggtttctacttccataaagccgcgcgcgaccatgaattgacggatagcggccagaatttttgaacggacaacaaacgtttgacgggatttatcgttagcgatgaggtccagataacgttgacgataacggacttcctgatcctgcagaccatggaatttatctggtaaaggacgtagtgctttagtcagcaggcgcagctcagtacagtgaatggaaagctcacccgtttgcgtcttaaacagcgtaccgcgggcaccgataatgtcacccagatcccattttttaaactgatcgttataaacaccttctggcaggctatctcttgcaacgtacagttgaatacggccaccgacatcctgcaacgttacaaaggaggctttccccatgatacgacgggtcatcattcggccagcaaccgagacttcaatgtttaaggattccagttcctggttatccttcgcatcaaactcttcgtgcaactggtcagaggtatggtcgcggcgaaaatcattgggaaacgccacaccttgctgacgtagtgccgccagtttttcgcggcgatttctcagttcatcgttaaaatcaatagcctcattggctccccgtgtttcttgttcagacattttggttcctctaaatccagctttcaatttagcgtagataaagagacagatcggtacactgtattatctgcctcgactattagtaactcagtttatcttatcgaaactaacgcttacctcaagttgatatcactaataaataaccatcaaaatggtttaaatgacttattaatctcgatttgttagtgttataaactgaaagttaatttattcataaccaattgtttttacgacagttaatcgttgctctcctgtatcatattcgtcggcgtgctaaacagaaaacgggtagcaaaggccaatacgacgatgatcgcgacacaagccaacgtccactctcccatctgagaaaagaatcgctggtaagctgcaattgccataccgctaatttgcgactctgtcgtctgctgtgccacgacgcctgccagccagttggcgaccgcgcctgttgccagcatataaatcccggttaatacgccagacattttcagacgcgtgatttgcgcaatcgccaccgggtcaataaagagttcggcaaagcccattagcgccagcccggatatcatcacgcccattgacgcttgaccgtcagccgctgcatgtcgggcatcaaatgccaacaacataaagccacaagccatcagcagtaagccaaaggcaaacttcagccagacgcgcaatgttgagttgccgcggctttctggcgacgccagccaggccagtacaaccccagcgagcatcaccgcaattgcattcaccgactggaatagtgctgtaggtacttcaatattgaatgcctgacgattcacaaagcgatcgataaacaagctgatggtactgccgccctgttgtgccagtacccagaacaatgtcccgacaaacatcaacaatacaatttgccaaagagcacggcgatgttcggggaatttgatcatcatgcgggcaatgatttgtgcggcaatgaggcaaacgatcgccagcaaatatccggaccagtcgttctccagcagcagagtaaaaaatactggggctaaacagagcatcaccactaaccagctccatactggtaaggcaaatttgacactagtgagcgcttttttatccatactacgtgtggactggaaatgacgatgaccgcttaagaaaatcaacaaaccgataaacatgccgccacccgcaagggcaaagccaacatgccatccataccactgagcagccaggccgcaggcgattggggctgcgatagaaccgatattgcccgcagcatacagcagcgaaaaaccgccatcacgtcgatgatcgttctcgtcgtagagctcgccaagcaaacagctgatgtttgatttgaataaaccgtagccacaaataatgattgccagcgccagatacaggctaaaggttgaatttgtatcaatacccagcaccacatggccaagggtcattaacagcgcgccggcaatcactgcagtgcggttgccgagcaggcggtcggcaagccagccgccgagaataggggtaacgtaaaccagagaagcatatgcgctgaacaggctgatggcatggttatcatcaaaaccaagctgatgggtgagatagagaatgagtaaggcacgcatgccgtaaaaactgaagtactcccagatttggatcgccacgatatagtatatcgcgcgcggctgtgagggtgttttcatgtgttctccttatgagcaaaaaagggaagtggcaagccacttcccttgtacgagctaattattttttgctttcttctttcaataccttaacggtatagcggccatcagcctgacggtatgcaccgtgaatatcggtttcaaagcccggatagtgagcgccgatttcacacagcatctgcaggaactccagaaccggacggctttcttcggtgatcatttcacccggcattaccagaggaactcccggcgggtacggaaggatcatattggcgttaatacgacctaccatttcgtcgaggtaaacttcttcggtcataccgtgcagctctttctggaatgcagcatacggagtcattaccatcgtcggcagcacttcaaatgcgcgatacatcagatccggcagattgtggtgaacaatcagtttgtggatattctgagccagttcctgaatacgcatgttttcatagaattcaggatcttcacgatacagagacggcagcatgtttttcacacgcaggttcaggtcgaacgcacgtttaaagtcagtcagagcacgcagcaggctcagtgctttggtcttatcgataccgatgctgaacaggaacagcaggttatacggaccggttttctcaacaacgatgccatgttcgtcgaggtatttcgccacgatgctggccggaataccaaagtcgctcatggtgccgtctttttccatccccggagtcagcagggtgactttgatcgggtcaagatacatgtgctcgttatcgatgtttttgaagccgtgccaggtgctgtcagaacgcagcggccagcattcagtcgtatcgatatgatccggctgccatacatcaaagaaccagccatcagattccgttctcagacgtttgatctctttacggaatttgatcgcacgttcaatagaaccgttgatcagacgcttacctgcattgcctttcatcatcgccgcagcggtttcagtggacgccacgataccgtagtgcggagaagtggtggtgtgcatcatgtaggcttcgttaaaggtttcttcgtttacgtcacctttaacgtggatcatggaagcctgagagaacgccgccagcagtttgtgagtggactgggtttcgtaaatcactttcccttctacacggccaccgctcataccgcatttaccttcgtaaatcggtgagaagttggtgtaaggcacccacgcggagtcaaagtggatggatttcacatccagtgttttcttgatgaagtcggtgttgtacagcagaccatcataggtagagttggtaattacagcatgtaccggccaggttgcgtttggtgtttctttcacgcgcttagcaatggtagcgtgctggaattcactctgtgggataccaccaagaataccgtaagcgttacgggtcgggcggaaatagattggcgtaacatcgctcatcatcatcaggtgggtcagcgatttgtggcagttacggtcaatcagaatggtgctgcctgctggagcagagtacataccaacaattttgttcgcagtggaagtaccgttggtcaccatgtagctgcggtctgcgttaaagacgcgagcgatatactgttctgcttctttgtgtggaccactgtgatccagcagagaacccagttcagatactgaaatggaaatatcagatttcatggtattcggaccaaagaaatcatagaacaggctacctaccgggcttttctggaatgcagtaccgcccatgtgaccaggagtacagaaagtatatttaccttcacgaacatatttaaacagtgctttagtcagcggaggcagaatagtgttgatatattcgtcagtggtctgcttgatcttattagcaatatcttcagcagcacccagcgcatattcaaagaagctaatctgtaaacgcaggtcattcaggcttacatcgagagtggaatacgtattagcgaacgcgtacaacggcaggttctcgttcattttgctaatttcttcgcacagctcgagattatatttatcccagtcaaaaataacgccgcacagacgcgcattgttttcgatcagttttaataagtcgtcacggtcgttcgggtaaacaatctggaagttcagacgttcaagcgcgcgatgaagttcacggatgggttcttctttaaaataaacccccatgtgattcaatattgcaataacgttcatagtcatatctccaggtaaaaaaggcccctcccaacacatgggacaaaatgaaaggaggagcctcggaaaatacttttaattaatgtgcgttagacgcggtgtggttatccattgagtggctctggcgctcgtgcattttgcgagcgtagaacatcaggataatcaggctgacgatgaaggtacctgccagctcgaaggagcttgcgcccatcagcgcgatgaagcagaacacgcaacccagtacagagcagatcaggctgacaaagttgcggatgttaacgccttcaaaacgaatcaggtcaacgcaagagtagaaatacggcagcatagtcagcagtactgcgataccggtcagttcaccgaacaggtcagatgctttaccaccggcagagttcatcagagtgataaggatcatcagggcagtcattttcactgcagccagcagcagaccttttttcggaataccgttgctgtcgacttcaccataaactttcgggaagttaccgtcgttagcggcacgtacacctgcctggcctaccaacatcatccaggagcccagagaagtcaggcacgcaaaggcggtgaatgcagaaaccagcggcgcagcccagttaccgaggatagttgaagcactgattgcaaacggagcaccggaagccgccattacagaagacggatacataccggaaagcacctgagtcgcagcgatgtaaacaatacctgctaaaccagtacccagcatggttgccagcggaacggtacgtttcgggtttttaaccataccagtacttacagctgcggattcaacacccacgaaggcccacaggcagagcagaatacttttaatgatcgcatgaccatcagtggtatccgcagtattccagttagctgcataagttgccgcatcaaaccaatgccagccaacaatagcagtcatcaccacaggaataagaaccagcaccagaccaatagtggttaaacggcttacccaagtaccgccgagcatatttacaaaggtaaatacccagacgatagcaatacaggcgatacccgccggaacaggatcatttaatactgggaagaaggtggaaagataagatacagcggtaataccaatcgccaggttaccaatccagttagcatggtaataaagaacacctgtctgaaaaccaaatgcaggggaaatttctccggcataagcaattgggccaccttgttgcgggttttttgttgccagtcgggcatatacatacgccagcgacattgcaccaataatagagataatccaaccccagatagcaataccaccgatacttgctaggttcgcaggtaataatgcaataccgctccccatcatattaccggcaacaacaccggtacaggcaaatagcccgatcttcttggcagaactcatgctcttctcctaatttcatttttgaatttggagtccgggtcatgatgtataactatttcctgaccagaccaaactggcgataagattactcacgaaaaaaggattaatcctaaagattaggtgaaataacacaaaagtttctgtaagtgagaacttgaggttttttattaacacatcaggatcgcaagttgatatcatgaaaagataaacatttaatgtttacaatggattgcgtgacattctctggttaaatttatgtaataaaaattatgcggcaaataaattgccgcaacatattataccaacaggaacatacaaaaactcaacaacaaatatttccgagcataaatcaacccggagttacttattctgaagcaagaaatttgtcgagataaggtacaacataaggaacagaagtctggaatataccattttcaatccagtaaagggtgtttgcccctgggcgtaaattaaaggcggtgagatatgcatcagctgcttcccggttcatccccttcatttcataaaccttgccaagcaacacataatttagccaggacatttcaagatcaatgccagtatttatcgcctggtaagactcatctgttttaccttttaccagagcactgaccgcttttatttgatatataatggacaggttgttcaattccggcagtgtaacaatgttatctatttctgtgttcagtgctgctaattgtttttcatctaaaggatgttgagaatggcgcacgatatcaactaatgctttttctgctctcgcgtaggtaaattctggggatgattgaacaatctcacctaataattcactggcacggttcaatgatttatcatcgccatgcagtaaataatcatgtgcctgataaaaattagttaataacgcaccacgatgcggcaaaattttctggagcgtctcctgcattcgttgtggccacggttggtttaacgcttttgataaactctccagtaaatcattttgaatcgccagctgattaccgttagtgatgacataacgtttatccagcatggttgaaccatctgcattgtctaccaattttatcgacataaagcattgttgagcacggtattggcgctgattaacaaacgcaatagataatgttttaccggaactgctcggttcatcaatgttgtagttgattttgtcatgcaccataaaggtggagaaggtgttaagtgatgtcgccaccaaatcacccacgcctatcgcgtaagagagctgatacggggaactccagctgttacaacttttatttaccatattaatgtcaatatcgcgtggattgagcaaaatacgcgatttgctcataggaagacgtgtatcaagacttgaaaacgctaccagtgctacacagatacctaacgacaacaggaaaaaaaaccatacccaaaaggtagtgaatcgtttgcttttaactggggattgttcaggtggcgttgcggtgttttgaatgttaagactgtgggagggagaatctgtggcaggaaccgcctctggtatagggggaggcgaagatagcattatttcctctccctcttcttcgctgtaccagataaccggcaccattaatttatagccgcgctttggtacagtagcgatatagacaggactatcttcatcattatcttttaatgacttacgtagttctgagatactctgcgtcacaacgtgattggtgacaatacttctcttccagacattatcgataagttcatccctgctaagtacttcgccactgtgttgagcaaagaaaaccagaagatcgattaatctcggctcaagggtaagttgacgcccattgcggctaatttggtttatggacggagtaacaagccattcgccaacgcgaactacaggttgttgcataatagaaactcattcgaaaagggaatgatgcaatgataattgccacaacctatttttaccatctatagatgggtttatttacatattattggtgaatgcaagacgttatttttaccagccataaacttcttgattacatagtattacgaaaggattttactgagaaccagaagtaatattccttaccatcaaaattcatcatctttgccaaagaaaaatgttcagaaaataatccatggaaaattgtccggagcacttactattttaatggattgttagtctttgcatgagcaagcgaactgatacatttctctttgttctcattcagaaaatctcatcagtcgccgttcagaccggtgttgtgctttatggatgcgttacgctcctgatgacgtcatttgacgttcaacagcatcacggggccgcacgacatttcacgtcagttagtgctatagctcaggaacaaattttcccgaattgggatatgcccgcaaattgctggtgatgtggggagaatctggttgagttcggtagaattgatttggaggcagaacgcttaaatcgtggcgtcctgaaacgaaaaacggacctccgtggaggtccgtttatatgaatttggtgcccggactcggaatcgaaccaaggacacggggattttcaatcccctgctctaccgactgagctatccgggcaacggggcgcattaaaccgtaatctgcacatctcgtcaacctaatttcagtaaaagcgattcaactgcttaagattgcggcaaatcgcttcttttctgtgtttctgtcaggtcaatgcaccaccctggcggcagcgggcgaagcgcaggatatcttccgccagccgatgtgcagtgtcgacatccgcctggctacgattcaccagcattcggcttaaacagccttccagcaccagttccatctgctttgctaccatcgccggatcgtcaacttccagtgtggttaacagttcgtgggtgaaatcgtaggccgcgcttttttgctgatcggccagttgatgaatagggtggccaggatcgggataaaacgtacaggcagcgataaatagacagcccggatagcggttgtttttaacgcactccgataacgcctgataacgtgccagcagcttttgttcggcggtttgcgtttcgtccagcatcagctgacgacgccagacatctatctgttggctaagataacgcagcgcatcgtagaggattgcctctttgtctggccagaagcggcgtagctcgtccagtggataatccacacgttcagcaaccatctccagcgtggtgttggcaatcccttgtaattctaataatttcagggcttctcccagtacatcttcacgttgcacgctattttcctccgtctttcccactgcaagtgtcgttcacggttggcgatcgcgcaaatgtgcgctgaaggtttcagcatccataaagcccgtgacgcgtgcttgtggatgctcctggccttgtccgtcaaaaaagagaattgtcggtaggccaaggacattaagatgctttaacagcgccacatcttgtgcgtcgttggccgtgacgttggcctgaagtaagaccgtgtctgctaacgctttttgcacctgcgggtcgctgaaggtgtatttctcaaactctttacaggcgacgcaccagtcggcataaagatctaacatcaccggtttgcctttggcttcaacgagcgcctgatttaactcatctaccgttttgatttgtgtaaagttgagatgcgtctgagtttgcgcggtatgcgtcgcaccaaatgcccaatcctgaagtgggcgcacgctaaccaatgccgctgccagcagaataatttgcacaatacgcatccagccgcgtttagcctgtaggctggtgataaaggcccagccaaagaatgcgacacccagcgccgaccacaagcgtaatccccatacatcaccaatcactcgctccagcaggaagaccggcagtgcgaggatcacaaaaccaaacgcggttttgacttgttccatccacgggccgcttttcggcagcaagcggttaccaaagacggtaattagcatcagcggcaggcccatgcccaacgcatagagataaagcgtgccgccgcccagccacatgttcccgctttgggcgatatacagcagaatcgcgctaagcggtgcggtggtgcatggtgaacagatcagtccggcaatcgcccccataacaaacacaccgccaggtgagccgccctgttggcgattgctcatcaacgtgagacgtgtttgcagcgaagaggggagttgcagggtaaacaagccaaacattgacatcgccagcaaggtaaagacgatggcgaggccaatgagcacgtatgggtgctgtagcgccgcctggaactgtaaccctgcggcggcaaccaccagacccagcgccgtgtaggtcagcgccatcccctgcacataaataaaggtcagcaacaatgctctggcagtggagagccgctgtttaccacccagcacgatgccagaaatcagtgggtacattggcagcacgcatggcgtaaaggcgataccaataccgatcaacaacgcccagagcgcggaaaagggcaattgcgcggtgggctgctcttgctgcggaacagacacaggctgtggcgctgcgttgttggcgaccacttcgcttaacggaacggttttggtttctggcggataacagaaaccggcatcagcacagccctggtaggtgacagttaacgtcgctcccgcactcgcctggttgatggtgacgggaagcgtcagccgatcgcggtaaatctcgcttttgccgtaaaactcatcttcatgccagacgccttgcggcagctgcacgtcggcaattttcgcgtgttccggcgtaatgcggatctgtttacggtagaggtagtaaccgtctttgatctgccaggtcagattaaggtcatgttggttttgctgaaaatcaaaagcaaaggcttgatccgcggggacaaattgtgaacgtcccggcgcgtcgaataatccggcaaaaacggaagtgctgcaaagtagcaggatcagcgtaaagatgcgttgagccatgagaggtaatctgtgtctccgtgtgtaacaggtaaaaccagaagttccggggtttgatatggatgatgagacttcaggcattccagcagtgcctgctggtgagatacggtagtttttaaaatcatctgcacttcgtattcttgctccagcttaccttcccagtaatagagagaggtagcgccggggatcaaggtcgcgcaggccgccagtttttccgccagcactttggcggctaaatcctgggctgtcgcttcatctggtgccgtacatagcaccacgacagacgcggtattcgaacttttttcatcaagcataaacacctcgcaagaacagatggaaccgcaagagagaggtcactatacaacggacgggggaaggatgttagtcggcgggaaagaaagcggggcgtgaacgccccgcgattgatcattacagcatgaagctacccagcacgaagccgaagcaaacggccagggcaacacccagagtacccgggatgaagaacggatggttgaagacgaatttaccgatacgggtagtacccgtgtcatccatctgtaccgcagcaaccagcgtcgggtaggtcggcagaatgaacagaccagacaccgcagcgaaagaagcaacagcggtcagcggtgaaacgttcagtgccagagccatcggcatcagtgcttttgcggttgcagcctgagagtacagcagagcagaagcaaagaagaagatgacggccagcagccacggatgaccctgaatcacttcaccagcggtatctttgatccagtcgatgttgttggaaacgaaagtatcgcccagccacgcaacacccaggatacaaatacaggcgctcatacctgctttgaaggtgctggagttgaggatgttgtcggtatcgactttacagataacggtggtcagagttgcaacgctgagcatgatgatcaggattgcgttggtggtgttcatcagcggtttttcaaccagacccatgcttgggctgttgatgattgcatagataaccacgccaactacgcccagcaggaacagccagacggacgtttttgcaccggatttgatttcaatctgcttttcaccgcgcagttcaaccaggccctcttccagacgcttgcgataaatcggatcgtcagagagtttggagttgaacagcatagtgaccaggaaggacatcaccagaaccgccagcagggtggacgggatgaccacggagagcagatggaggtagctgatgccatgaccttccatcacggaagacatgtaaaccactgccgctgagattggcgatgcggtgatcgcaatctgcgcggataccactgcagtagacagcggacggcaaggtttaacgccttgttccttcgcaacttcagcgataactggcagtgtcgccagagagatgttgccagtaccagcaaagatagtcaggaaataggtcacgatcggtgcgaggatcgtgatgtatttcgggttacggcgcagcagcttttctgtctgatgaaccagatagtccagaccgccagcaacctgcatggcagaaatagcggcgataaccgccatgataatggagatgacatcgaacgggatgttaccgggtttaacgccaatagcggcaagaaccagcacccccaatccgcctgcaaaaccaatacctattccccccaatctggcgcccaagaagatcgccagcaaaactatgatgagttctacaactagcatattagccttccttgttttttaacaagttgatattagattgttatttttaagttactgctcacaagaaaaaaggcacgtcatctgacgtgccttttttatttgtactaccctgtacgattactgttcgctttcatcagtatagcgttttgctttgtaagccgggtgcatcagattctgtacggagaaaatatcgtcaagttccgcttcagtcaacagaccgcgttccagaacgacttcacgtacactcttaccggtttcggcacagattttacccacgatgtcaccgttgtggtgaccgatgaacgggttcaggtaagtaacgataccgatagagttgtaaacgtaaccttcgcacacttctttgttagcagtgatgccgttaatgcatttttccagcaggttgtagcaagcgttggtcagaatgtgaacggattcgaacatggcctggccaatgaccggctccataacgttcaactgcagctgacctgcttctgctgccatggtaacagtggtgtcgttaccgatgactttgaagcatacctggttaaccacttccggaacaaccgggtttactttagctggcatgatggaagagcccgcctgcagttccggcaggttgatctcgttcaggccggcacgtgggcctgaagagagcaagcgcaggtcgttacagattttggacatcttcacagccaggcgtttcagcgcgccgtgaaccataacataagcgccgcagtcagaggtcgcttcgatcaggtcttcagccggtacgcatgggaagccagtaacttcagccagttttttcactgccagcggagagtactctttcggcgtgttcagaccagtaccgattgctgttgcaccaaggttaacttccagcagcagttcagcggtacgttggatgtttttcacttcttctttcagcaggatgctgaaagcgcggaattcctgaccgagggtcatcggtactgcgtcctgcagctgggtacgacccattttcaggatgtcctggaattcgacagctttacgttcaaagccttcacgcagttggttaatcgcatctaccagcttaatcagggaagagtaaactgcgatacggaaaccggtcgggtaggcgtcgttagtggactgacatttgttaacatggtcgttcgggttcaggtactgatattcacctttttggtgacccatcagttccagaccgatattggccagcacttcgttggtgttcatgtttacggaagtacctgcgccgccctggtagacgtctaccgggaactgatccatgcattttccgttgttcaggacttcatcacatgcggcaatgatggcattcgctacacttttaggaatggtttgcagctctttgtttgccatagctgcggcttttttaaccattaccataccgcgaacaaattcaggaatatcactgattttgttgttgctgatatagaagttttcaatcgctctcagagtgtgaacaccatagtaggcatcagctggaacttccctggtacccaacagatcttcttcgatacgaatgttgtttgacatgtgaaccttctttttcaagctgccaatgatttgctttaaacacacagaatatatgtggtttcgaatgtttttcgaccgacgattatcccctgcatcgaccgaatacccgagatcatatgctgcttgaggatttctaccgtaatctggatcactttaagtgtcggtttttaccccttaattattaatttgtgaaatagatcaccgctttgggattactaccaaaaatagttgcgcaaacatcttgaaattttgctaatgaccacaatataagctaaacgcgattcgcaacccattcaggtagccggggttaaccggctgctattacaggagaaacctttgcgctggttaccttttattgccattttcctttatgtctatattgagatttcaatctttattcaggttgcccatgtattgggggtattgctgaccctcgtgctggttatattcacgtcagttatcggtatgtcactggtacgtaaccagggctttaagaatttcgtgctgatgcagcaaaaaatggcggcgggtgaaaacccagcggcggagatgattaaaagtgtttcgctgatcattgctggtttgctgcttttattaccgggcttttttaccgacttcctcggtcttctacttttattgccgccggtgcaaaagcatctgacagtgaagttgatgccgcatttgcgcttttctcgcatgcctggcggcggttttagcgccgggaccggtggcggtaatacttttgatggtgagtaccagcgaaaggatgatgagcgcgaccgccttgatcataaagacgatcgccaggattaatgtcgaaacgccggattatgtggttatgccattttccggcgtttttcgttttggcagcaacagccataaccccgccagcatgatcagcgcatagagacttttccagccgaccattgccagtaacagaacgcataacagcccgccaaccaccgccagtagtcgataacgtccttgcaataatttacagcctgccagcatgcataacagataaatcataataaagatgccattggcataaataataagagcgtccagattgatctctaaagcatgaatcaccaaagtgctcaccacacagcagccgagcaccgcattgagggcattattcgggatatggcgagaagagaggcgtgccaggtagtggtcaggattatgttgcgcctgcgaccagaccaggcgggcgaagctctgtatataaatgttgagactggcaaagcaggccagatagccaatcacgcaggcaatccataacgctcctacaccgaacaactgcactacaatttttggaagcgatgctgccgccgccattttttcaccataggcgtcgaagtgtaagacgactaccgtacagccccagtagactaatcctgccagcagcagaccaatcatcaaagcacgaggaaaatcacgctctggatttttaaattccgaggcgagatgggcaaatgcctccagaccgacaaaacaccagaacatcactgataacgcagcaaataacccggtaagttcgatattaccaggtgccggaaaggggatattcgcaggtttgatatcgcccgcccaccagatagcgacaatcagcgcgacgataagtccggcaataacggtttgtagattagcactggaactggcaccgcgagtaccgatataccacaccagcgccagcgtaccgagttctgccaacaacagttgccagctatgccagccaaacatcgcctggccgaacccggcggcaatttgtagtgcggcaggcaaacccacgggaatgaccgataaaaacagccagccggtgactcgctcaagccgcgaaccaaacgccataccgacgaagtgcgcgacgccgcctgcgctgggatagtggcgacccagaatcgcaaacacaatcgcaatcgggaacactaagataatcaaaacgggccacgcccacaggctgttattgcccgctaccagcgcagctaacgcaggaacggcaaacacgccagtgcctaataatgacgtcgatagcaggccaatgccctgggccagccccagttcttgtttgagtccactcatgggttgatgtccgattgcgcccaaattttgggcaactgcgtagattttcgatggtagcacaatcagattcgcttatgacggcgatgaagaaattgcgatgaaatgtgaggtgaatcagggttttcacccgattttgtgctgatcagaattttttttctttttcccccttgaaggggcgaagcctcatccccatttctctggtcaccagccgggaaaccacgtaagctccggcgtcacccataacagatacggactttctcaaaggagagttatcaatgaatattcgtccattgcatgatcgcgtgatcgtcaagcgtaaagaagttgaaactaaatctgctggcggcatcgttctgaccggctctgcagcggctaaatccacccgcggcgaagtgctggctgtcggcaatggccgtatccttgaaaatggcgaagtgaagccgctggatgtgaaagttggcgacatcgttattttcaacgatggctacggtgtgaaatctgagaagatcgacaatgaagaagtgttgatcatgtccgaaagcgacattctggcaattgttgaagcgtaatccgcgcacgacactgaacatacgaatttaaggaataaagataatggcagctaaagacgtaaaattcggtaacgacgctcgtgtgaaaatgctgcgcggcgtaaacgtactggcagatgcagtgaaagttaccctcggtccaaaaggccgtaacgtagttctggataaatctttcggtgcaccgaccatcaccaaagatggtgtttccgttgctcgtgaaatcgaactggaagacaagttcgaaaatatgggtgcgcagatggtgaaagaagttgcctctaaagcaaacgacgctgcaggcgacggtaccaccactgcaaccgtactggctcaggctatcatcactgaaggtctgaaagctgttgctgcgggcatgaacccgatggacctgaaacgtggtatcgacaaagcggttaccgctgcagttgaagaactgaaagcgctgtccgtaccatgctctgactctaaagcgattgctcaggttggtaccatctccgctaactccgacgaaaccgtaggtaaactgatcgctgaagcgatggacaaagtcggtaaagaaggcgttatcaccgttgaagacggtaccggtctgcaggacgaactggacgtggttgaaggtatgcagttcgaccgtggctacctgtctccttacttcatcaacaagccggaaactggcgcagtagaactggaaagcccgttcatcctgctggctgacaagaaaatctccaacatccgcgaaatgctgccggttctggaagctgttgccaaagcaggcaaaccgctgctgatcatcgctgaagatgtagaaggcgaagcgctggcaactctggttgttaacaccatgcgtggcatcgtgaaagtcgctgcggttaaagcaccgggcttcggcgatcgtcgtaaagctatgctgcaggatatcgcaaccctgactggcggtaccgtgatctctgaagagatcggtatggagctggaaaaagcaaccctggaagacctgggtcaggctaaacgtgttgtgatcaacaaagacaccaccactatcatcgatggcgtgggtgaagaagctgcaatccagggccgtgttgctcagatccgtcagcagattgaagaagcaacttctgactacgaccgtgaaaaactgcaggaacgcgtagcgaaactggcaggcggcgttgcagttatcaaagtgggtgctgctaccgaagttgaaatgaaagagaaaaaagcacgcgttgaagatgccctgcacgcgacccgtgctgcggtagaagaaggcgtggttgctggtggtggtgttgcgctgatccgcgtagcgtctaaactggctgacctgcgtggtcagaacgaagaccagaacgtgggtatcaaagttgcactgcgtgcaatggaagctccgctgcgtcagatcgtattgaactgcggcgaagaaccgtctgttgttgctaacaccgttaaaggcggcgacggcaactacggttacaacgcagcaaccgaagaatacggcaacatgatcgacatgggtatcctggatccaaccaaagtaactcgttctgctctgcagtacgcagcttctgtggctggcctgatgatcaccaccgaatgcatggttaccgacctgccgaaaaacgatgcagctgacttaggcgctgctggcggtatgggcggcatgggtggcatgggcggcatgatgtaattgccctgcacctcgcagaaataaacaaacccccgggcagaaatgtctgggggtttttcttttggtcatctttctagtataagattcagacacggacgacgcgagtggcgtccagctcattgattatggggaataacatgcacgtaaaatacttagcagggattgtcggtgccgcgctactgatggcgggttgtagctccagcaacgaattgagtgctgccggtcagagtgtacgcattgtggacgagcagccaggcgcagagtgccagctgattggtactgcgacaggtaagcaaagcaactggctttccgggcaacacggagaagaaggcggttctatgcgcggcgcagcaaacgatctgcgcaaccaggcggctgcaatgggcggtaacgtgatttatggcatcagtagcccgtcgcagggaatgttgtccagttttgtcccgacggatagccagattatcggtcaggtttataagtgcccgaactgatgtgatccagaggctgggtgacaaacgtataattgcctgatgcgcttcgcttatcaggcctacataaggcattgcaactgattgaatgcttgagaatttgtaggccggataaggcgtttacgccgcatccggcatgaccaacgatcacgttatcagtcatttcaggctggatggctccagcctcgcattagcaaagatgagattatttcgcctgtggtgcagttttgctggtggattgaacacgtaagtgatgcagcgcgcgtaagcattgatcctgggttagcggttgggcgttattcgccgctacggtgcgaacatagacctgacatggcacacccgcgagttttttcagtcgtgggctgaaatcaagcattcggcgagtgatcgcttctatttctttacccggcgttgcttcacgcgttttcaccactgcgccgctaaattgttctttgccactttcatctttaaagcggtaaagcaccgccagataatggtcgaacaagttatgtttccattccggttgggaataggtgtcatattccagattgccattgtcctggcagtcaacgtcgtataacggcaggaaatctaacagtgaggtaatacgtaatgccagttcacgcatttccgcattattaattgcatgaatgattgctcgcgccagcatttcaatctgcaactcattgacgactaactcacatttgctaccgtcatgtagcgttaatacgaaggtaagattttcgccttgattatcggtaagttccagcgtgttaacccgacgattaatatcggcatttttaagctcatcaaccagaatttctgggatgttttctgccattttcttaatgactttatcgcgagcttgctcatactgaaggtgtgcagcagcatccagtttatgcttttgatgcagacgactttccagcgcaatcagcaggtcgcgcagttccatgacagacataaagaacaacgattctttattgcgaggttctttaattttcagcgccagtgcaatgaaattattactcttgcgaataacaccggtattaacacccttgatgcttatggccatgtaggttctccctaaccatttctcaattaaataattaattttaatttataagccagataaatgggcttggtagtaatagttgttaaaataacataaatagccgtactcactctatataaacagaaaagaaaggttaattattggtgttagctatataaaaagtaacaacagcaatgcatatgaataattaaaggttatgcaacgggcaaagattaaacttcccagtttaatgacaggttgctgtacttgcgtttgttgctcttgccggatgcagcgtaaacgccttatccggcctacagttcattgcaaatccattcaatttcaatgcacgatgtaggcctgataagcgtagcgaatcaggcaattttaatgtttaacttccctgtttaatcagttactgctggcgtagctggagatccagcggcgttttgctgggttcgccgccaatttctcgcgccagtttcggcaccagatatcccgacaccagtgtcagcaactcacgcataatctgccgtgcttcgtcatcactcaccataaaatgcgccgcgccctgtactttatcgagcacatgcaggtaatacggcattacgccggcatcgaacaacgcattactcaggtttgccagcgtttgtgcgttatcgttcacatcacgtaacagaacgctctggttcagcaaagtaacgcctacccggcgcaacttagccatcgcctgacggaatgtttcatctacctcattggcatggttgatgtgattcaccagcaagatttgcagcgtagaacgggcaaagcattcaaccagcgcctcggtgatacgtgccgggatcacaatcggcagacggctgtgaatccgcagacgttttatatgcgggatggcttccagttgtgtgagcaaccagtccagctcgtgatctttcgccatcagcggatcgccgccggagaaaatcatctcgtccagttccggatgcgcagcaacatactcaagtgcagtttgccagttacgcttgttgccctgattttcggcataggggaagtgacgacggaagcaatagcggcaatttaccgcgcagccgcctttgaccagcaaaagcgcccggttgtggtatttatgcaacaaaccagacactacgctgtgctgttcttccagtgggtcggtggagaatccgggcgcgatgacaaactcatcttgcgaggtaagtacctgacgcaaaagaggatcgtccggattgcctttctccatgcgatcgataaatgagcggggcacacgcagggcaaaaagctttttggcgctgcgtccggctaacagtttttcctccgcgtctatattcaaaagacgcagaagttcatcaggatcggtcacaacatcggcaagttgcgttaaccaatcttctctggatggggtatttagggttacaatatgcgccattttgtggcttagctaccaattaacaaatttcagagggccttatggcaacgtactatagcaacgattttcgtgctggtcttaaaatcatgttagacggcgaaccttacgcggttgaagcgagtgaattcgtaaaaccgggtaaaggccaggcatttgctcgcgttaaactgcgtcgtctgctgaccggtactcgcgtagaaaaaaccttcaaatctactgattccgctgaaggcgctgatgttgtcgatatgaacctgacttacctgtacaacgacggtgagttctggcacttcatgaacaacgaaactttcgagcagctgtctgctgatgcaaaagcaattggtgacaacgctaaatggctgctggatcaggcagagtgtatcgtaactctgtggaatggtcagccgatctccgttactccgccgaacttcgttgaactggaaatcgttgataccgatccgggcctgaaaggtgataccgcaggtactggtggcaaaccggctaccctgtctactggcgctgtggttaaagttccgctgtttgtacaaatcggcgaagtcatcaaagtggatacccgctctggtgaatacgtctctcgcgtgaagtaatgcggttgtggtgcggcctgcaggctgcaccatcacttattcaggtcagagatgatgaaacgccttatcgttcttgttttgcttgccagcacgctgctcacgggctgtaacaccgctcgcggtttcggcgaagacatcaaacatctcggcaactccatctctcgcgctgccagctaatttttcttctcttccgaaaaatcatcagattcccatcatttttggcgatgttgtctattattaatttgctataggcaaacataaataacattacctaaaaggaagacgttatggtgaagaagacaattgcagcgatcttttctgttctggtgctttcaacagtattaactgcctgcaacaccacgcgtggcgttggtgaagacatttctgatggcggtaacgcgatttctggcgcagcaacgaaagcgcagcaataagcaataacggtacgacagctgtgtcgtgccgtttgttttttctgcgatagtcacaaaggtaatagttgaaattcccctgccacctggcaaaatatccgttcaaccatcagctttgcaggacgacctgcaaacgcctcttttcaccggggacggccccaattctccggagcctgatatgtcctggattatcttagttattgctggtctgctggaagtggtatgggccgttggcctgaaatatacccacggctttagtcgtttgacgccgagtgttattactgtgacggcgatgattgtcagtatggcgctacttgcctgggcgatgaaatcgttaccagtagggacggcttatgccgtgtggacgggtattggcgcagtcggcgcggccataaccggcattgtgctgctcggtgagtccgctaacccgatgcgcctggcgagtctggcgttaatcgtattggggattattggtctgaaactcagcactcactaactaccaggctgctgtacccaaataaatttactgacatcaaacccttcccgggtcgcgactgccagcatctcctgtttcacttcgtcagaaatggttggcgtgcgggagagtatccacaggtagtcgcggtccgggccgcaaaccagcgcatggcggtattcccgatcgagtgcaataacgttataaccgccatagaaaggaccaaagaatgacactttcagcgcagcgcgagttggtgcgccggtaaagtacgctttcccttcactctgctgccacattcctctgtcagggttatagcctttattaatgacattcaggccgccgtcatcacgcaggctgtatgttgcggtgactttttccagtccacgttcaaagcggtgatcaaaacgggcaatctcataccaggtaccgagataacgtttggcgtcgaaattatttactacggtcacgccacgcggcggcgtaggagaactgcaggcaacgaccagaaatgcagctgtcgctgcggcaacgagagggagcaggcgcataaatgtttccttactggtttttttctaagtgtagatgacagcaaggaaaagcggagaaaaggtccgaaaattcggacccgatggaattttactgtagagcgttaagaatctgccaggcggcgtcgactctcgctggattgggatagtttttgtttgccagcatcacgatacccagctctttttctggaataaacgcgacatagctaccaaatccgccggtcgcccctgttttatgtacccatgatgcgcgtactgcaggagttgggggcgtaatcgcttttacggggcgtgctgccagtgcaattttattgtcactgccgttaatgatgctgtcaggatttaccggccagtccagcatttcccagcccaggccctgatacatatcgccggtttgccagtagcgagattgtgccagttgtatcccttgttgaagcgttttctcattgatatcaaggggttttaaattgctttgcacccagcgggccatatcttcaatggtcgacttcacaccataagcttcagcatctaacgccccaggcgaaacatgcactgccttaccttcgcgatatccccaggcgtaattcttttcttctgcgggcggtacattaatccacgtatggttgagtttgagtggctggaagacacgagtttgcatcgcctgctcaaaactcaaaccagacggcttcacagccagtgcgccgaacaaaccgatactggagttggcatacagacgttgtgttcctggagcccatgcaggctgccagttttgatagaagcgcagcaagtcgcttgaggatttcacctcatccggcacctgcaatggcaggccgccagcagtgtaggttgcgagatgtaatagtgtgatcccattccactgtttagcggtaagttcaggccagtattttgttgtgggatcgcttaacttgatttcccctcgagcaatagcgtcgccaccaagcacgccagtaaatgttttgctgaccgaacctaactcaaacaacgtttgctgtgtgacgggctgctttttggcgatgtccgcatagccccaggtaaagtaataaggtttaccctgataaattaccgccaccgccatacccgggatcttttgttgctctataagcggggtaattgtgcgatgcacaatatcgttgatttgttgaggggcagcaaatgtggagcaagaggcggtaattaataaggcgcagagcgtcgttttgaacatagggtctggtttccatacaaaacggcccgccataggcgggccggatttacattggcgatgcgttagattgtaacgacaccaatcagcgtgacaactgtcaggatagcagccagaccgtagaaaacccatttgcccgcaggtacgtggattttcagatcgtgcatcgcgtggtgcatacggtgtaaaccacaccacagcggcagaacgatcatcaggaacaggaatacgcgaccaatgaagctctgcgcgaacgccagaacgcgctcgtagctcagcgcatcacccggaaacaaccccagtggcagcagaatacccaccagcaggatcatcaccggcgcaatgatggcgctccacataccaccggccccgaagaggccccagaataccggttcgtcagaacgctttggatttggattaatcatctcaggctccttaccagtacagggcaacaaacaggattacgatggtggcaaccacagttaccgcccagagacttttgataattggctctggtcccattttttcgtcttttacaatgatattggccgctttcggtgccagttcaaaccaggttttggtgtgcagcagagctgccgccagagtgatcaggttaatgatcacgataaccgggttttgtaaaaagtcgacgaatcccgcccaggcttccgggccatttttcagggcaaacagcccgaaaatcagttcaatgctgaaccacacagccggaaccgccgtgccttcgcgcagcatgtaaaagcgataaaacggcaattttttccaccaggtggacgtcattggccgtacatacggtttacgtttagtcgtcatgttgcactccttagcgtggtttcagggtcgcgataagaaagtctttcgaactttctactttgccctgctgaatggccgcagccggatcgacgtgtttcgggcagacttcggagcagtagcccacgaaagtacagctccatacgccgttctggctgttcaactgcgccatacgctccttcttaccgtggtcgcggctatcttcgttataacgatgcgccagcgtaatggcagccggaccgatgaactctgggttcaggccaaactgcgggcacgcggcgtagcacaaaccacagttgatgcaaccggagaactggtgatacttcgccatctgcgccggggtctggatgttagtaccctgatccgcggtgcgggagttgccgatgatgtacggtttgatcgcttccagactttcgatgaagtgggtcatatcgaccaccagatcgcgttcaatcgggaagttagctaacgcttcaaccttcataccgtcggtgtaatcacgcaggaaggttttacatgccagttttggcacgttgttaaccatcatgccgcaggaaccacaaatcgccatacggcaggaccagcggtagctcaggttcggtgccaggttgtctttgatgtagcccagcgcatccagtaatgaggtagttgcgtcataaggcacttcatagaatgcgctatgcggtgcggtatcgacttccgggttatagcgcaccacctcaattttcaggtttttcatctcagccattcgccttctccttcttattggctgcttccgccttatcggctgcatccgcttcgccaccgtaaacgcgtttagctggcggcagcgtagtaatcttcacgtcgctgtactccaggcgagtcgtgccatcagcatcgcggaaggcgagggtgtgtttgaggaagttgacgtcgtcacgctcggtgcaaccttcgtccagacgctggtgcgcgccgcgggactctttacgtgccattgcggagtgcgccatacattcagcaacgttcagaccgtggcccagttcaatggtgtagagcaggtcggtgttgaacacgctggaagtgtcggtgatgcgcacgcgcttgaagcgttcctgcagctctgccagcttgtcgatggttttctgcatcagttccggcgtacggtagataccgcagccttcttccatagccaggcccatttcgtcgcggatcttcgcccagttttcgccgccatcctggttaaccagatctttcagacgttgttcaacgccagctgcctgcgcttcaattgccgcttcgttgccattaccggcagttgctgcacgctctgtcgcttgttcaccggccagacggccgaagaccaccagttccgccagggagttagaacccagacggtttgcaccgtgcagaccaacagaggaacattcacccacggcgaacagacctttaatgcgggtttcacagttctgatcggtttcgataccgcccatggtgtagtgtgcggtcggacgtaccggaatcggttctttaaccggatcgacgccaacgtacgctttcgccagttcgcagatgaacggcagacgttcatgcagttttttctcgccgaggtgacgcaagtcgagataaaccacatcgccacgcggcgtggagatggtgttgcctttacgccattcgtgccagaaggcctgagagactttgtcgcgtggacccagttccatatatttgtttttcggctcgcccagcggagtttccgggcccatgccgtaatcttgcagataacggtagccatttttgttgaccagaataccgccttcaccgcggcaaccttcggtcatcaggataccggaacctggcagaccggttgggtgatactgaacgaattccatgtcacgcagcggaacgccgtggcttagcgccatacccataccgtcaccggtaacgatgccgccgttggtgttgtaacgataaacgcgacccgcaccgccagtagccataacgaccgcgttagcacggatctgcaccagcgtgccttccatcatgttcattgctaccaggccgcgaacatgaccatcatcaaccagaatatccagcacgaaatgttcgtcaaaacgctggatctgcgggaattgcagagaggtctggaacagcgtgtgcagcatatggaagccggtcttatcggcggcgaaccaggtgcgctcgattttcatgccgccgaagcgacgtacgttgacgctaccatccgggcgacggctccatgggcatccccacagttccagttgggtcatttcggttgggcagtggtggacgaaataatccacgacatcctgctcacacaaccagtcgccacccgctactgtatcgtgaaagtgatattcgaagctgtcatgatcctgcgcgacagcggcggagcccccttctgcagcaacggtatggctacgcatcgggtatacttttgagattagtgcgatttttgcattcggatttgcctgcgcggcagcaattgcagcacgtaatcccgcgccaccggcgcctacaatggcaagatcggcttgaaaggtttgcacgacattcctccagattgtttttatcccacagccacgtacttcagggtaagtacctgaaagttacggtctgcgaacgctattccactgctcctttataggtacaacagtatagtctgatggataagtctgaaatttgacgagatcgatttttttagtgcgcaagagggctaaattatcactgaagatgattaatttaattactaaaccatcagatcgtgctttttttagtcactgcccaccgctgtttgattcctgcgtaaaatttgtctcgccgtcgcgttgcgagtagacttcgtgcccttgtcaaaaactggagatttaactatgagcgaaacggcatcctggcagccgagcgcatccattcctaacttattaaaacgcgcggcgattatggcggagatccgtcgtttctttgccgatcgtggagtgctggaggtggagacgccttgtatgagccaggcgacggtaaccgatattcatttggtcccgtttgagacacgtttcgttggccccgggcattcgcaggggatgaatctctggttaatgaccagcccggaataccatatgaaacgcctgctggttgccggttgtgggccggtattccagctgtgccgcagcttccgtaatgaagagatggggcgttatcacaaccctgagttcactatgctggagtggtatcgaccgcactatgatatgtaccggttgatgaacgaggtggacgatctcttacaacaggtgctggactgcccggcagcagaaagcctttcttatcaacaagctttcttgcgttatctggaaattgacccgctctctgccgacaaaacgcaactgcgggaagtcgcagcgaaactggatttgagcaatgttgctgataccgaagaagaccgcgacacgctgctacaattgctgtttacctttggcgtagagccaaatattggcaaagaaaaaccgacctttgtgtaccactttccagccagccaggcatcactggcgcaaatcagtaccgaagatcatcgggtcgctgaacgctttgaggtttattataaaggtattgagctggcgaatggtttccatgaattgacggatgcccgtgagcagcaacaacgctttgaacaagataaccgtaagcgcgcggcgcgcggtttgccgcagcaccccattgaccagaatctgattgaagccttgaaagtcggtatgcctgactgttccggcgtggcattaggtgttgatcgtctggtgatgttggcgctgggcgcggagacactggctgaagtcatcgcctttagcgttgaccgggcataattctgaaaaattactgaattaacagcgaagaatggcgtgataagcgccattctgtagcatatgttttcatttttccgttaaaggccacaatttaagactggatatttgatatcatccaggtatcaattctgtattggtttttacgctgcctgctcaatgttgcgcagtgcagttcagtgggcacgtgttatacacgcgctgaaatgaaggatggtttcatgcctcacacgataaaaaagatgagtctgataggactcatattgatgatctttacttccgtatttggatttgccaatagcccatcggcttattacttaatgggttatagtgcgattcccttttatatattttctgcattgttattctttattccattcgccttaatgatggctgaaatgggagctgcttatcgcaaagaagaaggcggtatctattcctggatgaataatagtgtcggaccacgttttgccttcattggtacgtttatgtggttttcctcttatatcatctggatggtgagtacctccgcgaaagtttgggtaccgttctcaacattcctctatggtagcgacatgacccagcactggcgtattgccggactggagcctacgcaggtggttggtctgctggctgtggcatggatgattctggtcaccgtcgttgcttctaaggggattaataaaattgcccgcattactgcggtgggcggtattgcagtaatgtgtctgaatttagtattgctgttagtaagcattactattttgttattaaatggtgggcatttcgcgcaggatattaatttccttgcatcaccgaacccgggttatcagtccggtctggcaatgctatcgtttgtggtatttgccatttttgcctatggcggaattgaagcggttggtggtctggtcgataaaacggaaaatccagaaaagaactttgccaaaggtattgtttttgccgctattgttatttcaatcggttattcgctggcaatatttttatggggcgtcagcacaaactggcagcaggtattaagtaatggttccgttaacctcggcaatattacctatgtgctgatgaagagccttgggatgacgctgggtaatgcactgcatttgtcacctgaagcgtcattgtcgctgggcgtatggtttgcgcgtattactggactttcgatgttcctcgcctataccggtgcgttctttacgctttgctattcaccgttgaaagccatcatccaggggacgccgaaagcattgtggccggaaccgatgacgcgcctgaatgcgatggggatgccgtctatcgccatgtggatgcagtgcgggttggttactgtcttcatcctgctggtttcgtttggtggcggtaccgcatcggcgttctttaacaagctgacgctgatggcgaacgtgtctatgacgcttccttacctgttcctcgcgctggctttcccgttctttaaagcacgtcaggatctcgacagaccgtttgtgattttcaaaacgcatttgtcggcaatgattgcgacagtggttgtcgtactggtggtgacatttgcgaacgtcttcaccatcattcaacctgtggttgaagccggagactgggacagcacattgtggatgattggcggccctgtcttcttctcgctgttagcgatggcgatttaccagaactattgcagcagagtggcaaaaaatccgcagtgggcggtggaataacccgatgccctatcgtctacctgacgatagggcgtaaagacaggaaatgttatggatgacaccagccgggacccggcaataaccgaagatgaaatcagggcgctgcaattttctgccggggatgtagcggaaatagagcagacgattctctcttttgtcgatgcctgccacacccgtaaagtggcgatggtggtgggtagcaccattaacaccctcaaagatcgcgatggtaaacggtggggaaacctgccggatatttattgcgcttatcttatccgatgtctggtttttcgcggggaattagtgggatacggcgatttgtttcgtatgcgctatagcgaaattaagcgaccggttaccttatgagtgcgcgcatgtttgtcttatgctgcatctggtttattgtggcgttcctctggataaccatcacttccgcgctggacaaagagtggatgattgatggacgcgggattaacaacgtctgcgatgtgttgatgtatctcgaagaagacgatacccgtgatgttggtgtgataatgacgttaccgctctttttcccttttctctggttcgctttgtggcgaaaaaaacgcggctggtttatgtacgccaccgcgctggctattttcggctactggctgtggcagttttttctgcgctatcagttttgtttgtgagccggattggttcatccggcacacaaacttacaaacttcccgcctgacgacctttgcccgcagacgtcagcgttctccccgtttgtttaccgttgaggctttccagacgcatctggaagggcgggaatggcatatcgataccgtgggcatggaagccagccagaatcagctggtggatctcatggcgtagcggcatacggtgacccatctcagcggcgtaaatacgcagctcgaaaatctgaatcccctgttgcagatccaccaggaagacttccggtgccgggttgtcgatcaccagcgagcagcgacgcgctgcggtgagcaggatttccgtcacttcttcgctattggcatcggcaggggccggtatcgtcaacaccacgcgcgtgaccgagtcagagagcgaccagttgataaactgctcggtaataaacgccttgttcggcacgattatctctttacggtcccagtcgctgatggtggtggcgcgggtgttaattttcgtcacgctaccggtgagatcgcgaattgtcaccgtatcgccaatgcgaatcggtttttcgaacaggataatcagaccagagataaagttggcgaaaatttcctgcaaaccaaaaccgagaccaacaccgagcgcggcaaccagccactgcaatttcgaccactcaataccaatcattgagaagccgaccagcccgccaatcagcatcagcagatatttggtgatggtggtgatggcgtaacccgtacccggcgttaaatccaggtgctgcaaaatcgccagttccagcagcgcgggcaagttgcgcaccagctgcgtggtgatgataaacaccagaatggcaatcagcaccgcaccgagggtaattggctccagactttctacgccctgtaccgtggaggtgacatcccacagcgaaatattttcgaggaagccgaaagcggaatggatttctgaccacagcacaatgacagaaagcagggcgatcaacatcaaaattgagcgcaccagccgcaaggattgcgcactgatggcatcgagatcgacttcgctttcatcgacttcaattgctccttccgggctactgtgatgatgcgcttcctcttcgccacgcgcacgttgcgctaacatctctgcccggcgatgcttcgcccgatcaaacgccagcctgcggcgctggatcagcatccagcggcggataacgtgataaaccaccagtagcaggaaccagatggcaaccgaggtttcaagcctcgctaacagcgcctgtgccgttgccagataacccaccgccgacgccagaatggcaaccaacggcgcgccaatcatcatgttccacagcatatggttggtaatgttgtcgccgctgccctctttgttgagatacagcggaatcccggcctttttcaggctgagggtgaccaccgccagcgcaccgcaaatgaggataaagcaaagccgtcccagcgaaccggagaattcacggtcgtcgaggttatcgaacatcatcagcgccataatcagcggcacaataagcccgatgctcatcaggtagtagcgcatcccacgggaaacacgttcgcgcggccagccaaaatgagcgataaacaagccgttcgggcgggcaaaggtggcgcaaatcatcactacccacagcagcggcacggtggccgttacaccatcgccaatcgcgaccgccagcggataaggccacgcctcgcgcaagccgtaacccagcgtcatccacagcaccggtaacggtgacgcgacgagaatcgaccagaaaagagtgcgcaacgtcagccagaagtgatcctgagtcactttgccaactttcgccgccgaacgttcaagaaaacgggtgaaatagcggcgcgagtaaatactgcaaccgaccagaatcaacgcgccaaacagcggcaaaattgtctctttgctggtcagcatcatcacactggctttgcccaactgactgaaggtgtccagcgaaatgagacgacgcagatcctgggcgatttccagcggccaggcgatggtcatcgggcgcacgtcagaggtccagaacagatagcggtgcgttgcttcgttcacctctttcagcgcatcctccagttgcccgttggagactttcagcttggtcagttccaatagtagcgtgtcgccaccctgcaacaatgagttcagcaactcacgctgagtgcgcagttgtgcttccagaatacggttttgctcggcagtcagcggctgaccgtcggcctgatgaatttgccgtagcagcggctgtttattaagcagatcctcataacgtaaccgttgcacacgcaactgcgccatttcggtatcaagctgttgtggtttcggcatttccggcagccgtgccacctgcgcccgcagcgcttcgccgagcagattggacgatcccagccattgcgactgttcacgcagcgtattcaacgcctgccggacctgtaacgtctggctggcagcctgacgctgttgcgaggcaacgagatccatccgctgcgcctgttgattcaaagccgccgatagttcgcggttaattttgaattgcgcgacgatatctttcggcaaatcggcgctgttttctgccagcaattcggtactttccagcgcccgctccgcctcaagctgacgttggctgtttaattgattacgcaaggcctgcaaatacgcatccagttgctggctctctttttccgccagctctgagcgtaagcgcgctaattcctggcggttattggcagacagctgcgccagctccagttcatcaacgagcgccttaagacgtgcagagtcagactgcaacgcgaaattttgtgcctgattgagcggagtattgccggtaagcgttcccaggcggcgctcgatctcatttaactgacggcgggcgtcggtttgctgttgcggcagttgattcagcgaatcggcaatctcgcgggcgcgctcctgctcttgctgggcctgacggcttttatccagcaactggctgctgacctggagaatttcctgattcagcgcgtcggtagacattcccggcgacacgctgcgcggctcgtcacgcatgttgtttaattgtgcgcgcagagtagcggagagtttcggataattatcgataacttgctgatattgtttgatgcgctcaagggaaccttttcgttcctcaagcgcatttaaggcagactggagcgcctctacgacttccggctgtgcgggtttcgccgcttttgcctgctccagttcctgagtgatttgtttgctatcgggggccgtcgcggcgtacgccccccaactgaggcaccaggccatcagaaaagtgataatcaggcgcacgtcagcgtttcctttgatggattagacctggtcttttttgtcgtcaaccaatgggctggcgtcgtgttctgcttcgatctcttcagcaggaagcggggcaggttcagcgtctggcgtaacaaaggtttcggtagatactgccagcggctggccaattttcgtgacagacaggctttccagttgctcaaccagattcactttacccggtgcaaacaggttgataacggtggaaccgagtttaaagcgacccatttcctggcctttcagcagtgccacagaaccgtcgttttccccggcaggccaggtccagcgcttgatgataccttcgcgcggcggcgtaatggtgcccgcccagaccgtctcaatgctgccaacaatcgtcgctccgaccagaatctgcgccattgggccaaattcggtatcgaaaaggcaaatcacgcgttcgttacgggcaaacagattcggcacgttctgagccgtgagatggttaacggagaagagatcgcccggcacgtagatcatctcacgcagaataccgttgcacggcatgtgtacgcggtggtagtcacgcggggagaggtaagtggtcacaaacgtaccgttgcggaacaggtccgccatcagatagttgcctgccagcagggcttcgaggctgtagttgtggcctttggcttgcaggattttatcttcttcgattttacccaactggctgataacgccatcggcaggcatgaccagtacattcggatcggtatcgattgggcgtacttcgtcacgcagcggacggacaaagaattcgttaaaggtgcggtagctggcggtgtccggcttttgcgcctctttcatgtcgaccttgtagtatttaacgaacagatcgataaccagttttgtcagccatcctgcccgcttgcttgcgccccaacccgccaggcgagtaagccatagtttcggcagaatgtactgtagcgaaagtttaaatgaatttaacaaggtagcctccaggccattgttttgtcgttcctgatccggcctacatgccggatcctgaaaaaaaggggacgattctaacgacggttagcttaattgtcagtcatccgtatcagaaaagtttttacgcgtttttacctgcgccatgctttccagaatacggtgatagttttcgaaacgggtttccgcgattttcccttcctcaaccgcttcccggatagcgcagcccggatcggtatcgtgtttgcaatcgcgatatttacacagacctaaatagtcatggaattcgacaaagccctgagtgatttgttccggctccaggtgccagaggccgaactcacgcactcctggggagtcaatcacatcaccgccgtgcgggaagtgatacagccgagcggcggtcgtggtgtgctgaccgagccccgagttgtcagagatatcgttggtcaggatctctttttgcagccccagcaacgcattcagcaggctggatttgccgacgccagactgcccggcaaaaatgctgatgcgcccggtcaacgcctcttccagcggttttagcccatcctgagtatggctggaaaccatcaatacgcgataaccgatattgcggtagatatccatctgctcgttgacgaacgccatgccttcgtcgtccagcaggtctatcttgttgagcacaataatcggctcaatctgcaaggtttcgcaggccaccaggtaacggtcgataatattgagcgacagctccggcaaaatggcggagacaatgacaatctggtcgatgttggcggcaataggttttacgccgtcgtagaaatccggacgcgtcaacaccgaggtacgctcatgcaccgcttccacgatccctttgacatttacgccttccgccgccggtttacccggacgccagactacgcggtcgccggttaccagcgaacggatggtacggcgaatattgcagcggtgaacgtcgccatcggcggattccacatcagcgtgcataccaaagcggctgatgacgataccttcatcaggctcgccaaacagattgtcgtcgtagtcgggcttctccttagacgttttaagacgacgctggtgattggcgttcacgcggcgctgctggcctttggagagtttatttttactcaatcgtacagactcctggtcgcccctgatgggcaaaacatctatgatacacgcaattgtggatcaatatagtcactgtgaatgggtggaaaatagcatgagtgccaatgaaaacaacctgatttggatcgatcttgagatgaccggtctggatcccgagcgcgatcgcattattgagattgccacgctggtgaccgatgccaacctgaatattctggcagaagggccgaccattgcagtacaccagtctgatgaacagctggcgctgatggatgactggaacgtgcgcacccataccgccagcgggctggtagagcgcgtgaaagcgagcacgatgggcgatcgggaagctgaactggcaacgctcgaatttttaaaacagtgggtgcctgcgggaaaatcgccgatttgcggtaacagcatcggtcaggaccgtcgtttcctgtttaaatacatgccggagctggaagcctacttccactaccgttatctcgatgtcagcaccctgaaagagctggcgcgccgctggaagccggaaattctggatggttttaccaagcaggggacgcatcaggcgatggatgatatccgtgaatcggtggcggagctggcttactaccgcgagcattttatcaagctgtaaaatttttcctggtcacgtaagcgccggaatccacttgcggcggcgtgattttgacgctaaattgaacgtcttgctgataatttcagcacttgagataaaaacgcaaaaaaaacttttttggggggttgcagagggaaagatttctcgtataatgcgcctcccgtaacgacgcagaaatgcgaaaattacgaaagcaaaattaagtagtacgcgggaatagctcagttggtagagcacgaccttgccaaggtcggggtcgcgagttcgagtctcgtttcccgctccaaaatttgaaaagtgctgcaaagcacagaccacccaagcgggaatagctcagttggtagagcacgaccttgccaaggtcggggtcgcgagttcgagtctcgtttcccgctccaaaatttgaaagtgctgtaaggcacagaccacccaagcgggaatagctcagttggtagagcacgaccttgccaaggtcggggtcgcgagttcgagtctcgtttcccgctccaaattcttctctcaataaaatatccacagcgacgcgatgcgttattgctggtttttgttgtctctgacaaactcttgtaaacagagttatccacagcctcaggctgtaatcttaatttcaaagaaacttcgcacggtgaatagtatttttttaacctattgatagataagttaaaaattaagattccgttttgtcgagtcgatcacttgacgattttattcgtcttgaattgcaatgcgtttttatttttattcacaagctgtggatgaatcaggcgtcacgcggtaaccctttttcaatcacccgaaccagacgctgttttttcggcaattgcacttcgactatgcacgcatttcgtctctctatttgctgcgcaatcgcccacgctatgtgctcatcgagaagtgggtgctcacctttacgactttccagcgctgtcaaaatcgtttcatcccaaggggcattgcctaatgctacggcgatattacgcagccaacgcaggtgaccaatacgacgaatcgccgatccttccgtgacttttaaaaacttctcttcgctccaggcgaataactcaatgagttccggtgcgtgtagcggcttacgcgggctgaaatcctcttctgtggtgagttgtgaatagcgattccacgggcagataagctggcagtcatcgcaaccgtaaatacggtttcccattaacggtcgcaactcttccgggatcgccccttcaagttcgatggtgagataagagatacagcggcgagcatcgacggtatatggctcgacgatggcaccggtcgggcaaatcgtcatacaggccacgcatttgccgcatccttcctcgactggttgatccacgggcagcggaatatcgaccagcaattcgcctaaaaagaagaacgaaccggcctcgcgattgaggataagtgagtgcttacctgtccagccgagcccagctttttcagctaacgggcgctcgagaataggcgcagaatcgacaaacggtctaaaattcagcgaaacacaatgttgctgaatcatctcgcccagctttttgagtcggttgcgcagaagtttgtgatagtcacggcccagcgcataacggctaacatagccgagtttggggtttttcagcgtgctggcaaatgcggcgttagcaggaaggtaattcatccgcacgctgatcacgcgcagcgtaccgggcaataactcatgagggcgagcgcgcagcataccgtgacgtgccatccagtccatttcgccgtggtattgtttgtccagccatgcttgcagtttgggctcggactcgctgagatcggtatcggtaatacctacctgctgaaagcccagttccagcccccactgtttaattttttgcgctaactgattgagatcgaggggctctgacatgacggaccatacaatgaagaaaaaccccgtaagtataccacacaccgtctggtacgccgacgatatccgccgcggagaacgcgaggcggcagatgtgctggggctcacactctatgagctgatgcttcgcgctggcgaggccgcattccaggtgtgtcgttcggcgtatcctgacgcccgccactggctggtgctgtgcggtcatggtaataacggcggcgatggctacgtggtcgcgcgactggccaaagcggtcggcattgaggtcacgttgttggcccaggagagcgacaaaccgttgccggaagaggccgcgctggcacgcgaagcatggttaaacgcgggtggcgagatccatgcttcgaatattgtctggcccgaatcggtagatctgattgttgatgcgctgctcggtaccggtttgcggcaagcgccccgcgaatccattagccagttaatcgaccacgctaattcccatcctgcgccgattgtggcggttgatatcccttccggcctgctggctgaaactggcgctacgccaggcgcggtgatcaacgccgatcacaccatcacttttattgcgctgaaaccaggcttgctcactggaaaagcgcgggatgttaccggacaactgcattttgactcactggggctggatagttggctggcaggtcaggagacgaaaattcagcggttttcagcagaacaactttctcactggctaaaaccgcgtcgcccgacttcgcataaaggcgatcacgggcggctggtaattatcggtggcgatcacggcacggcgggggctattcgtatgacgggggaagcggcgctgcgtgctggtgctggtttagtccgagtactgacccgcagtgaaaacattgcgccgctgctgactgcacgaccggaattgatggtgcatgaactgacgatggactctcttaccgaaagcctggaatgggccgatgtggtggtgattggtcccggtctgggccagcaagagtgggggaaaaaagcactgcaaaaagttgagaattttcgcaaaccgatgttgtgggatgccgatgcattgaacctgctggcaatcaatcccgataagcgtcacaatcgcgtgatcacgccgcatcctggcgaggccgcacggttgttaggctgttccgtcgctgaaattgaaagtgaccgcttacattgcgccaaacgtctggtacaacgttatggcggcgtagcggtgctgaaaggtgccggaaccgtggtcgccgcccatcctgacgctttaggcattattgatgccggaaatgcaggcatggcgagcggcggcatgggcgatgtgctctctggtattattggcgcattgcttgggcaaaaactgtcgccgtatgatgcagcctgtgcaggctgtgtcgcgcacggtgcggcagctgacgtactggcggcgcgttttggaacgcgcgggatgctggcaaccgatctcttttccacgctacagcgtattgttaacccggaagtgactgataaaaaccatgatgaatcgagtaattccgctccctgatgagcaggcaacattagacctgggcgagcgggtagcgaaagcctgcgatggcgcaaccgtaatctatctgtatggcgatttaggcgcaggtaaaaccacctttagccggggctttttacaggctctgggtcatcagggtaatgtcaaaagccccacttatacgctggtcgaaccctatacgctcgacaacttaatggtctatcactttgatttgtaccgccttgccgatcccgaggagctggagtttatggggatccgcgattattttgccaacgatgccatctgcctggtggagtggccacaacaaggtacaggtgttcttcctgacccggatgtcgaaatacacattgattatcaggcacaaggccgtgaggcgcgcgtgagtgcggtttcctctgcgggtgaattgttgctggcgcgtttagccggttaacctttgaaaggtggcgggatgatgtatcgcatcagaaattggttggtagcgacgctgctgctgctgtgcacgccggtgggtgccgcgacgctctctgatattcaggtttctaacggtaatcaacaggcgcggataacgttgagttttattggcgatcctgattatgcgtttagccatcaaagcaaacgcaccgtggcgctcgatatcaaacaaacgggcgtgattcagggactgccgttgttgttcagcggcaataatctggtgaaggcgattcgctctggaacgcctaaagatgcacaaacgctacggctggtggtcgatcttaccgaaaacggtaaaaccgaagcggtgaagcggcagaatggcagcaattacactgtcgtctttacgattaacgccgatgtgccgccaccgcctcctccgccgcccgtggttgcgaaacgcgttgaaacgcctgcggttgtcgcaccgcgcgtcagcgaaccggcgcgcaatccgtttaaaacggaaagtaaccgcactacgggtgttatcagcagtaatacggtaacgcgtccggcagcgcgcgcgacggctaacactggcgataaaattatcatcgctattgatgccggacacggcggtcaggaccctggcgctatcggccccggtggtacgcgggagaaaaatgtcaccatcgccatcgcgcgtaaattgcgtactttgctcaatgacgatccgatgtttaaaggcgttttaacccgtgacggggattactttatctcggtgatggggcgcagtgatgtggcacgtaagcaaaacgccaatttcctcgtgtcgattcacgctgatgccgcaccgaaccgcagtgcgactggcgcttccgtatgggtgctctctaaccgtcgcgccaacagtgaaatggccagctggctggagcagcacgagaaacagtcggagctgctgggtggggcgggtgatgtgctggcgaacagtcagtctgacccctatttaagccaggcggtgctggatttacagttcggtcattcccagcgggtagggtatgatgtagcgaccagtatgatcagtcagttgcaacgcattggcgaaatacataaacgtcgaccagaacacgccagccttggcgttctgcgctcgccggatatcccatcagtactggtcgaaaccggttttatcagcaacaacagcgaagaacgtttgctggcgagcgacgattaccaacaacagctggcagaagccatttacaaaggcctgcgcaattacttccttgcgcatccgatgcaatctgcgccgcagggtgcaacggcacaaactgccagtacggtgacgacgccagatcgcacgctgccaaactaaggacgattgatgccaattcaggtcttaccgccacaactggcgaaccagattgccgcaggtgaggtggtcgagcgacctgcgtcggtagtcaaagaactagtggaaaacagcctcgatgcaggtgcgacgcgtatcgatattgatatcgaacgcggtggggcgaaacttatccgcattcgtgataacggctgcggtatcaaaaaagatgagctggcgctggcgctggctcgtcatgccaccagtaaaatcgcctctctggacgatctcgaagccattatcagcctgggctttcgcggtgaggcgctggcgagtatcagttcggtttcccgcctgacgctcacttcacgcaccgcagaacagcaggaagcctggcaggcctatgccgaagggcgcgatatgaacgtgacggtaaaaccggcggcgcatcctgtggggacgacgctggaggtgctggatctgttctacaacaccccggcgcggcgcaaattcctgcgcaccgagaaaaccgaatttaaccacattgatgagatcatccgccgcattgcgctggcgcgtttcgacgtcacgatcaacctgtcgcataacggtaaaattgtgcgtcagtaccgcgcagtgccggaaggcgggcaaaaagaacggcgcttaggcgcgatttgcggcaccgcttttcttgaacaagcgctggcgattgaatggcaacacggcgatctcacgctacgcggctgggtggccgatccaaatcacaccacgcccgcactggcagaaattcagtattgctacgtgaacggtcgcatgatgcgcgatcgcctgatcaatcacgcgatccgccaggcctgcgaagacaaactgggggccgatcagcaaccggcatttgtgttgtatctggagatcgacccacatcaggtggacgtcaacgtgcaccccgccaaacacgaagtgcgtttccatcagtcgcgtctggtgcatgattttatctatcagggcgtgctgagcgtgctacaacagcaactggaaacgccgctaccgctggacgatgaaccccaacctgcaccgcgttccattccggaaaaccgcgtggcggcggggcgcaatcactttgcagaaccggcagctcgtgagccggtagctccgcgctacactcctgcgccagcatcaggcagtcgtccggctgccccctggccgaatgcgcagccaggctaccagaaacagcaaggtgaagtgtatcgccagcttttgcaaacgcccgcgccgatgcaaaaattaaaagcgccggaaccgcaggaacctgcacttgcggcgaacagtcagagttttggtcgggtactgactatcgtccattccgactgtgcgttgctggagcgcgacggcaacatttcacttttatccttgccagtggcagaacgttggctgcgtcaggcacaattgacgccgggtgaagcgcccgtttgcgcccagccgctgctgattccgttgcggctaaaagtttctgccgaagaaaaatcggcattagaaaaagcgcagtctgccctggcggaattgggtattgatttccagtcagatgcacagcatgtgaccatcagggcagtgcctttacccttacgccaacaaaatttacaaatcttgattcctgaactgataggctacctggcgaagcagtccgtattcgaacctggcaatattgcgcagtggattgcacgaaatctgatgagcgaacatgcgcagtggtcaatggcacaggccataaccctgctggcggacgtggaacggttatgtccgcaacttgtgaaaacgccgccgggtggtctgttacaatctgttgatttacatccggcgataaaagccctgaaagatgagtgatatcagtaaggcgagcctgcctaaggcgatttttttgatggggccgacggcctccggtaaaacggcgttagccattgagctgcgtaaaattttaccagtagagttgataagcgttgattctgcccttatttacaaagggatggatatcgggacggcgaagccgaacgctgaagagttactcgccgcgccgcaccgattgctggatattcgcgatccgtcgcaggcttactcggctgctgattttcgccgcgatgcgctggcggaaatggccgatatcaccgcggcggggcggatcccactgttagtgggcggtacgatgttgtatttcaaggcattgctggaagggttgtcgccgctaccgtcggcagacccggaagtacgggccagaattgagcaacaggcggcagagcaaggttgggagtcattgcatcgtcaacttcaggaggtagatccggttgcggcagcaaggattcatccaaatgatccacaaaggctttcccgggcactggaagtttttttcatttcgggtaaaactttaacggaactgacgcaaacgtcaggagacgctctaccgtatcaggtgcatcagttcgccatcgccccggcgagccgtgaactgctccatcaacgcattgagcagcgttttcatcagatgttggcttcaggttttgaagcagaagtccgggcgctttttgcccgaggagatttgcatacggacttgccttccattcgttgcgtgggttatcgccagatgtggtcttaccttgaaggcgaaatctcatacgatgaaatggtttatcgaggtgtttgcgccacgagacagttggcgaagcggcagataacctggctgcgtggttgggaaggggttcactggcttgacagtgaaaaaccagaacaggcgcgtgacgaagtattacaggttgttggtgctatcgcaggctgaatgtgtacaattgagacgtatcgtgcgcaattttttcagaatcgaaaggttcaaagtacaaataagcatataaggaaaagagagaatggctaaggggcaatctttacaagatccgttcctgaacgcactgcgtcgggaacgtgttccagtttctatttatttggtgaatggtattaagctgcaagggcaaatcgagtcttttgatcagttcgtgatcctgttgaaaaacacggtcagccagatggtttacaagcacgcgatttctactgttgtcccgtctcgcccggtttctcatcacagtaacaacgccggtggcggtaccagcagtaactaccatcatggtagcagcgcgcagaatacttccgcgcaacaggacagcgaagaaaccgaataaggtttcgggctgtttttttacacggggagccagcgatcctgcgttccccgctgatctatttagagggttatacgcttgtttgaccgttatgatgctggtgagcaggcggtactggtacacatctattttacgcaagacaaagatatggaagacctccaggagtttgaatctctggtctcttccgccggtgtcgaagcattgcaggtgattaccggtagccgtaaagcgccgcacccaaagtattttgtaggtgaaggtaaagcagttgaaattgcggaagctgtcaaagcgacgggtgcttcggtcgttctttttgaccatgccctgagcccggcgcaagagcgtaacctggagcgtttgtgcgagtgtcgtgttatcgaccgcaccggccttattttagatattttcgcccaacgtgcgcgtacccatgagggtaagttgcaggttgagctggcgcagctgcgccatctggctacgcgcctggtgcgtggctggacccaccttgaaagacagaaaggcgggataggtttgcgtggtccgggtgaaacccagctcgaaaccgaccgtcgtttgttgcgtaatcgcatcgtgcagatacagtcgcgcctggaaagagttgaaaagcagcgtgagcaggggcggcaatcgcgtatcaaagccgacgttcctactgtttcgctggtgggatataccaacgccggtaaatctacccttttcaatcgcatcaccgaagcgcgggtctacgcggcagaccagttgtttgccaccctcgacccgacgttgcggcgtattgacgttgcagatgtcggtgaaaccgtacttgcagataccgtagggtttattcgccacctgccgcacgatctggtggcggcatttaaagccacgttacaagagacgcggcaagccacattactgctgcacgtcattgatgcggcggatgtgcgtgtacaagaaaacatcgaagcggtgaatacggttcttgaagagatcgacgctcacgagatcccaaccctgctggtgatgaacaagatcgatatgctggaagatttcgaaccgcgtattgatcgggacgaagagaacaaaccgaaccgtgtctggctttccgcacagaccggagcggggataccacagctttttcaggctttgacggagcggctttccggcgaggtggcgcagcatacattgcgtctgccaccgcaggaagggcgtctgagaagtcgtttttatcagcttcaggcaatagaaaaagagtggatggaggaggacggcagcgtaagtctgcaagttcgtatgccgatcgttgactggcgtcgcctctgtaaacaagaaccggcgttgatcgattacctgatctaacggcgtagcgtctgaagcgtggagtcatatcctctggcgtcgaaagacaacagggatcaccgcataacaaatatggagcacaaacatggcgtggaatcagcccggtaataacggacaagaccgcgacccgtggggaagcagcaaacctggcggcaactctgagggaaatggaaacaaaggcggtcgcgatcaagggccacctgatttagatgatatcttccgcaaactgagcaaaaagctcggtggtctgggcggcggtaaaggcaccggatctggcggtggcagttcatcgcaaggcccgcgcccgcagcttggcggtcgtgtcgttaccatcgcagcggcagcgattgtcattatctgggcggccagtggtttctataccattaaagaagccgaacgcggcgtggtaacacgctttggtaaattcagccatctggttgagccgggtctgaactggaaaccgacgtttatcgacgaagtcaaaccggtgaacgtggaagccgtgcgtgaactggccgcttctggtgtgatgctgacgtcggacgagaacgtagtgcgcgttgagatgaacgtgcagtaccgcgtcaccaatccggaaaaatatctgtatagcgtgaccagcccggatgacagcctgcgtcaggctaccgacagcgccctgcgtggagttatcggtaaatacaccatggaccgcattctgacggaaggtcgtaccgtgattcgtagcgatactcagcgcgaactggaagagacgattcgtccgtatgacatgggtatcacgctgctggacgtcaacttccaggctgctcgtccgccggaagaagtaaaagcggcgtttgacgatgcgattgccgcgcgtgaaaacgaacagcaatacattcgtgaagcagaagcgtataccaacgaagttcagccgcgtgcgaacggtcaggcgcaacgtatcctcgaagaggcgcgtgcgtacaaggcccagaccatcctggaagctcagggtgaagtggcgcgctttgctaaacttctgccggaatataaagccgcgccggaaattactcgcgagcgtctgtatatcgagacgatggaaaaagtgttgggtaacacccgcaaagtgctggttaacgataaaggtggcaacctgatggttctgccgttagaccagatgctgaaaggtggtaacgcccctgcggcgaagagcgataacggtgccagcaatctgctgcgtctgccgccagcctcttcctccacaaccagtggagcaagcaacacgtcgtccaccagtcagggcgatattatggaccaacgccgcgccaacgcgcagcgtaacgactaccagcgtcagggggaataacgatgcgtaagtcagttatcgcgattatcatcatcgtgctggtagtgctttacatgtctgtctttgtcgtcaaagaaggtgagcgcggtattacgctgcgttttggtaaggtactgcgtgacgatgacaacaaacctctggtttatgagccgggtctgcatttcaagataccgttcattgaaacggtgaaaatgctcgacgcacgtattcagaccatggacaaccaggccgaccgctttgtgaccaaagagaagaaagacctgatcgtcgactcttacatcaaatggcgcatcagcgatttcagccgttactacctggcaacgggtggtggcgacatttcgcaagcggaagtgctgttgaaacgtaagttctctgaccgtctgcgttctgaaattggtcgcctggacgtgaaagatatcgtcaccgattcccgtggtcgtctgaccctcgaagtacgtgacgcgctgaactccggttctgcgggtacagaagatgaagttactaccccggcggcagataacgccattgccgaagcggcagagcgcgtaacggctgagacgaagggcaaagttccggtcatcaacccgaacagtatggcggcgctgggtattgaagttgtcgatgtgcgtatcaagcagatcaacctgccgaccgaagtgtctgaagcgatctacaaccgtatgcgcgccgagcgtgaagcggtagcgcgtcgtcaccgttcacaaggtcaggaagaagcggaaaaactgcgcgcgactgccgactatgaagtgaccagaacgctggcagaagctgagcgtcagggccgcatcatgcgtggtgaaggcgatgccgaagcagccaaactgtttgctgatgcattcagtaaagatccggacttctacgcattcatccgtagcctgcgtgcttatgagaacagcttctctggcaatcaggacgtgatggtcatgagcccggatagcgatttcttccgctacatgaagacgccgacttccgcaacgcgttaatataacgactgcggtacaggtcaataaagccaccgcatcctcagggatgtcggtggttttctttttctataaggataatgaatgaattcgacaatctggctggcgcttgccctggttttggtactggaaggtttagggccgatgctttacccgaaggcatggaagaagatgatctctgcgatgaccaatttgcccgataatattttacgtcgttttggcggtggacttgtggttgcgggcgttgtggtctactacatgttgaggaaaacgattggctgaacaaaaaacagactgatcgaggtcatttttgagtgcaaaaagtgctgtaactctgaaaaagcgatggtagaatccatttttaagcaaacggtgattttgaaaaatgggtaacaacgtcgtcgtactgggcacccaatggggtgacgaaggtaaaggtaagatcgtcgatcttctgactgaacgggctaaatatgttgtacgctaccagggcggtcacaacgcaggccatactctcgtaatcaacggtgaaaaaaccgttctccatcttattccatcaggtattctccgcgagaatgtaaccagcatcatcggtaacggtgttgtgctgtctccggccgcgctgatgaaagagatgaaagaactggaagaccgtggcatccccgttcgtgagcgtctgctgctgtctgaagcatgtccgctgatccttgattatcacgttgcgctggataacgcgcgtgagaaagcgcgtggcgcgaaagcgatcggcaccaccggtcgtggtatcgggcctgcttatgaagataaagtagcacgtcgcggtctgcgtgttggcgaccttttcgacaaagaaaccttcgctgaaaaactgaaagaagtgatggaatatcacaacttccagttggttaactactacaaagctgaagcggttgattaccagaaagttctggatgatacgatggctgttgccgacatcctgacttctatggtggttgacgtttctgacctgctcgaccaggcgcgtcagcgtggcgatttcgtcatgtttgaaggtgcgcagggtacgctgctggatatcgaccacggtacttatccgtacgtaacttcttccaacaccactgctggtggcgtggcgaccggttccggcctgggcccgcgttatgttgattacgttctgggtatcctcaaagcttactccactcgtgtaggtgcaggtccgttcccgaccgaactgtttgatgaaactggcgagttcctctgcaagcagggtaacgaattcggcgcaactacggggcgtcgtcgtcgtaccggctggctggacaccgttgccgttcgtcgtgcggtacagctgaactccctgtctggcttctgcctgactaaactggacgttctggatggcctgaaagaggttaaactctgcgtggcttaccgtatgccggatggtcgcgaagtgactaccactccgctggcagctgacgactggaaaggtgtagagccgatttacgaaaccatgccgggctggtctgaatccaccttcggcgtgaaagatcgtagcggcctgccgcaggcggcgctgaactatatcaagcgtattgaagagctgactggtgtgccgatcgatatcatctctaccggtccggatcgtactgaaaccatgattctgcgcgacccgttcgacgcgtaattctggtacgcctggcagatattttgcctgccgggcgaacagtgtgatacattgctgtgtcgggtaagccattacgctatccgacacagtgttaaatcctcgcttttttccttccccgaactgaaataaattagcgacacagcttgtggctggtttatcatcaatataaatgtattttttcccgatttcccttttgaggttgatgtgcagttaacgagtttcactgattacggattacgtgcgctgatctacatggcgtcattgccagaagggcggatgaccagtatttctgaagtgactgacgtctacggcgtctcccgtaatcatatggtcaaaataatcaatcaacttagtcgtgccggctacgtgactgctgttcgtggaaaaaatggcggcattcgcctgggtaaaccggcgagtgcgatacgtattggtgatgtggtgcgcgagctggagcccttatcgctggtgaattgcagcagtgagttttgccacattacacctgcctgtaggttgaaacaggcactttctaaggccgtgcaaagttttcttacggaactggataactacacgcttgccgatttggttgaagagaatcaaccgctttataaattattgctggtggagtgacgaaaatcttcatcagagatgacaacggaggaaccgagatgtcacaagatcctttccaggaacgcgaagctgaaaaatacgcgaatcccatccctagtcgggaatttatcctcgaacatttaaccaaacgtgaaaaaccggccagccgtgatgagctggcggtagaactgcacattgaaggcgaagagcagcttgaaggcctgcgtcgccgcctgcgcgcgatggagcgcgatggtcaactggtcttcactcgtcgtcagtgctatgcgctgccggaacgcctcgacctggtgaaaggtaccgttattggccaccgtgatggctacggctttctgcgggttgaagggcgtaaagatgatttgtatctctccagcgagcagatgaaaacctgcattcatggcgatcaggtgctggctcagccgctgggtgctgaccgtaaaggtcgtcgtgaagcgcgtattgtccgcgtactggtgccaaaaaccagccagattgttggtcgctactttaccgaagcgggcgtcggctttgtggttcctgacgacagccgtctgagcttcgatatcttaatcccgcccgatcagatcatgggcgcgcggatgggctttgtggtcgtagtcgaactgactcagcgtccgactcgccgcaccaaagcggtgggtaaaatcgtcgaagtgctgggcgacaatatgggcaccggcatggcggttgatatcgctctgcgtacccatgaaattccgtacatctggccgcaggctgttgagcaacaggttgccgggctgaaagaagaagtgccggaagaagcaaaagcgggccgtgttgatctgcgcgatttaccgctggtcaccattgatggcgaagacgcccgtgactttgacgatgcagtttactgcgagaaaaaacgcggcggcggctggcgtttatgggtcgcgattgccgacgtcagctactatgtgcgtccgtcaacgccgctggacagagaagcgcgtaaccgtggcacgtcggtgtacttcccttcgcaggttatcccgatgctgccggaagtgctctctaacggcctgtgttcgctcaacccgcaggtagaccgcctgtgtatggtgtgcgagatgacggtttcgtcgaaaggccgcctgacgggctacaaattctacgaagcggtgatgagctctcacgcgcgtctgacctacaccaaagtctggcatattctgcagggcgatcaggatctgcgcgagcagtacgccccgctggttaagcatctcgaagagttgcataacctctataaagtgctggataaagcccgtgaagaacgcggtgggatctcatttgagagcgaagaagcgaagttcattttcaacgctgaacgccgtattgaacgtatcgaacagacccagcgtaacgacgcgcacaaattaattgaagagtgcatgattctggcgaatatctcggcggcgcgtttcgttgagaaagcgaaagaaccggcactgttccgtattcacgacaagccgagcaccgaagcgattacctctttccgttcagtgctggcggagctggggctggaactgccgggcggtaacaagccggaaccgcgtgactacgcggagctgctggagtcggttgccgatcgtcctgatgcagaaatgctgcaaaccatgctgctgcgctcgatgaaacaggcgatttacgatccagaaaaccgtggtcactttggcctggcattgcagtcctatgcgcactttacttcgccgattcgtcgttatccagacctgacgctgcaccgcgccattaaatatctgctggcgaaagagcaggggcatcagggcaacaccactgaaaccggcggctaccattattcgatggaagagatgctgcaactgggtcagcactgttcgatggcggaacgtcgtgccgacgaagcaacgcgcgatgtggctgactggctgaagtgtgacttcatgctcgaccaggtaggtaacgtctttaaaggcgtaatttccagcgtcactggctttggcttcttcgtccgtctggacgacttgttcattgatggtctggtccatgtctcttcgctggacaatgactactatcgctttgaccaggtagggcaacgcctgatgggggaatccagcggccagacttatcgcctgggcgatcgcgtggaagttcgcgtcgaagcggttaatatggacgagcgcaaaatcgactttagcctgatctccagcgaacgcgcaccgcgcaacgtcggtaaaacggcgcgcgagaaagcgaaaaaaggcgatgcaggtaaaaaaggcggcaagcgtcgtcaggtcggtaaaaaggtaaactttgagccagacagcgccttccgcggtgagaaaaaaacgaagccgaaagcggcgaagaaagacgcgagaaaagcgaaaaagccatcggcgaaaacgcagaaaatagctgcagcgaccaaagcgaagcgtgcggcgaagaaaaaagtggcagagtgatcaataccctctttaaaagaagagggttagattgctgacaaaatgcgctttgttcatgccggatgcggcgtgaacgccttatccggcctacataatcacgcaaattcaatatattgcagagatcatgtaggccggataaacgtagtgcatcaggcaaaacgtaaacaacgagtacattaatgagcgaaatgatttacggcatccacgcagtgcaggccctgctggagcgcgcccctgaacgttttcaggaagtctttattttaaaaggccgtgaagataaacgtctgttaccgctgattcacgcccttgagtctcagggcgtggttatccagttggcaaaccgccaatatctcgacgagaaaagcgacggtgccgtgcatcagggcattatcgcccgcgtgaagccaggacgtcagtatcaggaaaacgatctgccggatctgatcgcttcgctcgatcaaccgttcctgctgatcctcgacggcgtaaccgatccgcacaacctcggcgcgtgcctgcgtagtgcggacgccgcaggcgttcatgcggtgattgtgccgaaagatcgctccgcacagctcaacgctacggcgaaaaaagtagcctgcggcgcggcagaaagcgttccgctgattcgggtgactaaccttgcgcgcaccatgcgtatgttgcaggaagagaatatctggatcgtcggtacggcaggcgaggcggatcatacactctatcagagcaaaatgaccggacgcctggcgctggtgatgggtgcggaaggtgaaggtatgcgtcgcctgactcgtgaacattgcgatgagttgatcagcatcccgatggctggaagcgtttcttccctgaacgtttcggttgcgaccggaatttgcttatttgaagcggtgcgccagcgcagctaatttctcagaattatgaaaagccatccagatttggatggtttttttttgtctatagctggtaagataattacgtattgcaaatattcattttattaatatttaaacttaatctatatggaataatatatgacatggaatccgttggcgctagcgacggcgctgcaaactgtacctgaacaaaatattgatgtaacaaatagcgagaacgcattaattattaaaatgaatgattatggcgatttgcaaatcaatattctttttacttcccgccaaatgattatcgaaacctttatttgtccggtgagtagtatcagcaatccagatgaatttaataccttcttattaagaaatcagaagatgatgccgttgtcatcggtagggatctccagcgtacaacaggaagagtattacattgttttcggggcgttatcgcttaaatcttctcttgaagatatcctgcttgagataacctcgctggtagataacgcattggatctggctgaaattacagaagaatattcacactaattacaaggacgggtatttatgggaattttaaaaagtttatttacgctggggaaatcgtttatctcccaggcggaagaatccattgaagaaacccagggcgtgcgcatgctggaacagcatattcgtgacgctaaagctgaactcgataaagccggaaaatctcgcgttgatctgctggcgcgggtgaaattaagtcacgataagctgaaagatttacgtgagcgcaaagccagtctggaagcccgtgcgctggaagcgttaagcaagaacgttaatccgtcgttgattaacgaagttgctgaagaaatcgcgcgccttgagaatctcattaccgctgaagagcaagtgttgtcgaatctggaagtctcccgtgatggcgtggaaaaagcagttacagcgacagcgcagcgtatcgctcagtttgagcagcaaatggaagtcgttaaagccactgaagccatgcagcgtgcacaacaggctgtaacaacctctaccgttggcgcatcttccagcgtttcgacagcggcagaatccttaaaacgcctgcaaacgcgtcaggccgaacgtcaggctcgcctggatgctgccgcacagttggagaaagtcgcagacggtcgcgaccttgacgaaaagctggcggaagccggaattggcggtagcaataaaagtagcgcccaggatgtattagcaagactgcaacgccaacagggcgagtaatttttttgccagcctcgctaaaaggctggcaactattttaaggataaaatatgtctggttttttccagcgtctgtttggcaaggataataagccagctatcgctcgtggtccgctgggacttcatctcaatagtggctttacgctcgacacgttagcgtttcgtttgctggaagatgaattgctgattgcgctgccgggtgaggaatttacggtagccgccgtcagccacatcgatctgggcggcggtagtcagattttccgctactacacttcaggcgatgagtttctgcaaatcaataccaccggcggcgaagatattgatgacattgatgatatcaagctctttgtctatgaagagagctacggtatcagtaaagagagtcactggcgcgaggcgatcaacgccaaagcgatgggagcaatgaccttaaactggcaggaaaaacgctggcagcgattttttaacagcgaagaaccgggaaatatcgaacccgtctacatgctggaaaaagtagaaaatcaaaaccatgccaaatgggaggtccataattttaccatgggctaccaacggcaagtaaccgaagatacttacgaatatttgctgctaaatggtgaggaatcttttaacgatctcggcgagccagagtggttattttcgcgcgcgttgggtgtcgatatcccgctgacatcacttcatattattggttaattacaaggacgtttacaatgcatatactggattcacttcttgcctttagcgcctatttttttattggcgtggctatggtgattatttttctgtttatctattctaaaattacaccgcacaacgaatggcagttaatcaaaaacaataataccgcggcgtcactggcgttcagcggtacattgttgggttacgttatccccttatccagtgcggcaatcaatgcggtgagtattccagactatttcgcctggggcgggattgcactggtgattcagttactcgtttttgctggtgtcagactttatatgcccgcattaagcgaaaaaattattaatcacaataccgcagcaggaatgtttatgggaaccgccgcgctggctggcggtatttttaacgcagcttgtatgacatggtaatggacgatcatggccagaaaacgcaaatcaagaaataacagtaaaattggtcacggagcgattagtcgcattggtagaccgaataatccttttgaaccgtgccgcaatcgctacgcacaaaaatacttaacgttggcgctaatgggcggtgccgcttttttcgtattgaaaggttgtagcgatagtagcgatgtcgataacgacggcgacggaacgttttacgcgacagtgcaggattgtattgatgacggtaataatgccgacatttgcgcgcgtggctggaacaacgccaaaacggcattttatgccgatgttccgaagaatatgactcagcagaactgtcagtctaagtacgaaaattgctactacgacaatgttgaacagagttggatcccggtcgtttctggatttttgttaagccgggttattcgtaaagatcgcgatgagccgtttgtttataacagcggcggttcctcttttgcttcgcgcccagtctggcgcagcacttctggtgattactcctggcgctccggttctggcaaaaaagagtcttactcttcgggcggctttaccaccaaaaaagcgtctaccgtttctcgcggcggctatggtcgttcttccagcgcccgtgggcattggggaggctaatcatgctgagacacaacgttcctgtgcgacgggatctggaccagatcgccgctgacaacggtttcgactttcatatcatcgacaatgaaatctattgggatgagagtcgggcttaccgttttactctgcgccagattgaagagcagatcgaaaaaccgactgcggaactgcatcagatgtgccttgaggtggtggatcgcgcggtaaaagatgaagagatcctgacgcaactggcgatcccgccgttgtactgggatgtgatcgctgaaagctggcgcgcccgcgatccttcgctgtatggacggatggattttgcctggtgtggcaatgcgccggtgaagctgctggagtacaacgccgatacgccaacttcattgtacgagtcggcttatttccagtggctgtggctggaggatgcccggcgcagcggcattattccgcgtgatgccgatcagtacaatgctattcaggaacgcctgatttcacgctttagcgagctttacagtcgggaaccgttttatttttgctgctgtcaggacaccgatgaagacaggagtaccgtgctgtacttgcaggactgcgcccagcaggcagggcaggagtcgcggtttatctacattgaagatctcggtttgggcgtcggcggcgtactgaccgatcttgatgataatgtcatccagcgtgcatttaagctgtatccgctggagtggatgatgcgtgacgataacggtccgctgctgcgcaagcgtcgcgagcaatgggtggagccgttatggaaaagtatcttgagtaataaagggctaatgccgctgctttggcgcttcttccctggtcatcctaatcttcttgcgtcctggttcgatggcgagaaaccgcagattgccgctggcgaaagctatgtgcgtaaaccaatctattcgcgcgaaggcggcaacgtcaccatttttgacggcaagaataacgttgttgaccacgctgatggtgattacgccgatgaaccgatgatctaccaggcgtttcaacctctgccgcggtttggcgatagctacacactcatcggtagctggattgtcgatgatgaagcgtgcggaatggggatccgtgaagataacacactgatcaccaaagacacctcacgtttcgttccgcattacattgctggataagaatgttttagcaatctctttctgtcatgaatccatggcagtgaccatactaatggtgactgccattgatggagggagacacagtgcactggcaaactcacaccgtttttaatcaacctataccattaaataacagcaacttatacctgtctgatggcgcgctctgcgaagcggtaacgcgtgaaggtgctggctgggatagcgattttctagccagtattggtcagcagttaggaacggctgaatcccttgaactggggcggctggcgaatgtgaatccgcctgaattattgcgctacgatgcgcaaggacgccgtctggacgatgtgcgttttcaccccgcctggcacctgctgatgcaggcgctatgtaccaatcgggtgcacaatcttgcctgggaagaagacgctcgctccggcgcatttgtggcgcgcgcggcgcgttttatgttacatgcgcaggttgaggcagggtcgttatgtccgataaccatgacctttgccgccacgccattgttgttacagatgttacccgcgccgtttcaggactggaccacgccgctattgagcgatcgctacgattctcacttattgccaggtgggcaaaaacgcggtttgttgattggcatgggaatgacggaaaagcagggcggttccgatgttatgagcaacaccacccgtgcagagcgtctggaagatggctcttatcggctggtggggcataaatggtttttctcggttccgcaaagcgatgcgcatctggtgctggcgcagaccgcgggtggtctgtcctgcttttttgtgccgcgctttttgcctgacgggcaacgcaacgcgattcgcctcgagcggctgaaagataagctgggtaatcgctctaacgccagttgcgaagtggagtttcaggatgccattggttggttgttggggctggaaggggaaggaattcgtctgatcctgaaaatgggtgggatgacgcgttttgattgcgccctgggtagccatgccatgatgcgccgtgcattttcgctggcgatttatcatgcacatcaacgccatgtttttggtaatccattgatccaacagccccttatgcgtcatgtcttaagtcgcatggcacttcagcttgaagggcaaacggcgttgctgtttcgtcttgcgcgagcgtgggaccggcgtgccgatgccaaagaagccctgtgggcgcgtttatttacgcctgcggcaaaatttgtgatctgcaaaagaggtatgccgtttgtggccgaagcgatggaggtgctgggcggcattggttattgcgaggagagtgagctgccgcggctttaccgggagatgccggtaaacagtatttgggaaggttccggcaatattatgtgcctggatgtgttgcgcgttctcaataagcaagcgggcgtatacgacttattgtcggaagcatttgtggaagtgaaagggcaggatcgctattttgatcgcgcggttcgtcgtttacagcagcagctgcgtaagccagctgaagaactggggcgagagattactcatcagctattcctgctgggctgcggtgcgcaaatgttgaaatatgcttctccgccaatggcgcaggcgtggtgtcaggtgatgttagatacgcgcggcggcgtacggttgtcagagcagatccagaatgatttattgctgcgggcgacggggggagtgtgtgtgtaagcgtatacgactgatgcgacgctggtttcgattaactaaatgaaatatgtgaaaattgtaggccggacaaggcgctcgcgccgcatccggcattgttcatttgctgtagatgacactcatgcatacagtatcgcctgtacgcgccagttatcaggctgctggtcttcgtacatggtaataatgcggtaccatgacgcaccttgttcatcggcctttaacgccacgatacgttccacgtcctgcggatcccctgaaatattgctaactgagatctgacctatttcattcaggcccgtcacgcagtcagcactggcgaattctgcagactgtgccgtggcgctcgcaggataagtcactaattgcagcgagggtgaggcaagtaattgtttcatcgtcagctccatttttcgtttccccacatgttgcagggcattccatcgcggtaataaacgcccaggcttccagccggtaatttattgtgcacaggtaaacgcatagggacgcaaagcaatgtaaagctgactatgtaagttgtctgatttatttacggtacaaaatggcttgtgaataccactgtcctgtcacgatggtttcgtccaccatgacgacaacgtaataatcagcttttgcagcgacagctttcgctttgatttctgctaatgcgtcatccggagaaccccgaaccatcgtgcttacgctacctattcgctgtaacccttgcgtctggtcgcggcgaatctcttgcggatggtccgttactggcggtgctggctgtggcgtaccttgcagtgcgctacaggcacttaacatcaacaccaataataaactggcaaaccggtaaataacgctattacgtttcctgctaaccatagtgtagtgccttattaatttaactttgggggaatgttcccgaattgttacctggtacgcgattttcgaatgaaaacgtgacgaaagcgtaacccacatctcaacattatgaactaataccgccagcagaaacttgtgctaaggatttcttcatgtcataccagacaaaaaggagagacagatgattgaaatagaatcacgcgagctggcagatattcccgttcttcatgcttatcctgtcgggcaaaaagataccccgttaccgtgcgtaattttttatcacggctttacttcatccagtctggtgtatagctattttgccgttgcgctggcgcaggctggtttgcgggtgatcatgccggatgcgcccgatcacggtagccgttttagtggtgacgcagcgcggcggttaaatcaattctggcaaatcttgctacaaagtatgcaggaattcactactttacgtgcggcaatagccgaagaaaactggctgcttgatgaccgtctggcagtcggtggcgcgtcgatgggcgcgatgacggcactggggattaccgctcgccaccccacggtgagatgtaccgccagcatgatgggatcgggctattttacatcactcgcccgttcactgtttccaccgctgatacctgaaacggcagcacagcagaatgaattcaataacattgtcgcgccactggcagagtgggaagcgacaaaccacctggaacaacttagtgacagacctctactgctgtggcatggcctcgacgatgacgttgtgcctgccgacgaatcactacgtttgcagcaggccttaagcgagacgggacgggataaactgctaacctgttcatggcagccaggcgtgcgtcaccgcattacgcctgaggcgttagatgctgccgtgacatttttccgccagcatctttaaacacgcagaatgctgaccccttgcgcttccagttgttgcaggatttccgggttagcatttttgccggtgataagcatatcgatttgatcggcacggctaaaaagcattcccgcgcgttcgccaatcttactgctatcaaccagtaccaccagtttccctaccacgctcagcatcttctgctctgccattgctgtcagcatatcggttttatacaacccttctgcggtcagcccttttccgctggtaaacatccagtgcccggcatagagactgttttcgctgccctgcgggcttaaagtgatggactgacttttgttgtactgtccgcccataatgatcacgctgtcatgttcttgatcgatcaggtaatttgccagcggtagataattagtgatgatttgcactggcttgccacacatttcccgcccaagcagaaacgcggtggagccgcagttgatgactacgctttcgcccggattaaccagctgcgaggccgctttagcgatacgtactttttcatcgtgattctgcgcctgatgcagattcatcggcgtccagcgcgggcgctgttgggtaatagcttctgcgccattgcgcacttttttcagtttgccgctttcgtcaagtttattgatatcgcgtcgcgcagtggcaggcgaaattcccagacgctcaacgactttctcaacggtcacaaagcccaattgtgcgagcatttccaggaggatttgatgtctttgtgcttcagtcatgagctattccgataaaatttgatttttttagatgatatttgaaatagccaggaaatactacgccggatagcgcgaacttctccacgctacccggtataaacgacagattacaggaatgacttgaacggcagatccggttcaatagtgaagcaatcatcgaaaccgcgcggatagtggtactcgaagttgtctttatccagcggccaggtaaatttgccacccacctgccagataaacggcttgaagccatacttcaggcgatcttttttcatctcccacagcacgcggatctcttgcggatcggcctggaagtttgaccagatatcgtggtggaacgggatcactactttcgcattcagcgcttcacccatacgcagcatatcggcgctggtcattttgtcggtgataccgcgcgggttttcgccgtacgatcctaacgccacgtcgatctgatgttcgttaccgtgcttcgcataatagttagagtagtgggagtcgccgctgtgatacagggagccgccaggcgttttgaacaggtagttcaccgcgcgatcgtccatgccatctggcagtacgccagccgctttttgatcggcaggcagggtgatcagtgcagtacggtcgaaagcatcaagcgcatgaatttcaatgtctttcacttttactacatcgcccggtttgaccacgatgcaacgctctttcggtacgccccagccaatccacaaatccacacaggttttcggtccgataaacggtacgtcatctgcacaattctgcatcacggcagcagcgacgttaacgtcgatatgatcgttgtgatcgtgagtcgccagtaccgcgtcgatctggcgaatcgcaaacggatcaagaacaaacggggtggtacgcaggtttggctgcagttttttcacgccagccatgcgctgcatctggtgaccctgtttcattaacgggttaccgtgactttgtttgccagtgccgcaccagaaatcaacgcaaacgttggtgccaccttccgatttcaaccagatcccggtgcagccaagccaccacatcgcaaatgtgccaggagcgacctgttcttgttcaatttcttcattcaaccagctaccccactccgggaaagtgctcaggatccaggattcacgggtgatacttttcactttactcatcgccatttaccttcatgatagttcaattcgaatcaatatgtgattggttttgattaatcctgacactattttttcaggaaggcaatgaccattttttgactttttgccagggaagttgttgttgattttgagtatggaaagatttaatggaatgtgtaattcaattaactaaatgaatttaaatggataattgtttcgttgtgtgaatcccactctatccatgtggaattatttgcgggtcgcgtcacatttaatcataaataatcttgttgtgattacttttgaaaattagagtgagtgcacaacattccgggtgtgtggaatacccggttacctcttcttcaggagatcgttatggagatcctctacaacatctttaccgtgttttttaaccaggtcatgaccaatgccccgttgttgctgggtattgtgacctgtctgggctacatcctactgcgcaaaagtgtcagcgttattattaaaggcacgattaaaaccataattggtttcatgttgttgcaggcagggtccggcatcctcaccagcaccttcaaaccggtggtggcgaaaatgtccgaagtctacggcattaacggcgcaatttccgatacctacgcttcaatgatggcaaccatcgaccgcatgggcgatgcctatagctgggtgggttacgccgtattgttagcgctggcgctgaacatctgttacgtgctgttgcgtcgcattaccggcattcgcacaatcatgttgaccggccacatcatgttccagcaggccgggttgattgccgttacgctgtttatcttcggctactccatgtggaccaccattatctgtaccgcgattctggtttcgctctactggggcatcacttccaacatgatgtacaagccgactcaggaagtgacggatggctgtggtttctccatcggtcaccagcagcagtttgcatcatggattgcctataaagtcgcgccgttcctcggcaaaaaagaggagagcgttgaagacctcaaattgccgggctggctgaacattttccacgacaacatcgtctccacggcgattgtgatgaccatcttctttggtgccattctgctctccttcggtatcgacaccgtgcaggcgatggcaggcaaagtgcactggacggtgtacatcctgcaaactggtttctcctttgcggtggcgatcttcatcatcacgcagggtgtgcgcatgtttgtggcggaactctctgaagcatttaacggcatttcccagcgcctgatcccaggtgcggttctggcgattgactgtgcagctatctatagcttcgcgccgaacgccgtggtctggggctttatgtggggcaccatcggtcagctgattgcggttggcatcctggtcgcctgcggctcctcgatcctgattattcctggctttatcccgatgttcttctctaacgccaccatcggcgtgttcgctaaccacttcggcggctggcgtgcggcgctgaagatttgtctggtgatggggatgatcgaaatctttggttgcgtctgggcggtgaaactcaccggtatgagtgcctggatgggcatggcggactggtcgattctggcaccgccgatgatgcaaggcttcttctccatcggtatcgcctttatggccgtcatcattgtaattgcactggcttatatgttcttcgctggccgcgcgctgcgcgcagaagaagatgcagaaaaacaactggcagaacagtctgcttaataaggagttttgattatgaccgtacgtattctggctgtgtgtggcaacggacaaggcagttccatgatcatgaagatgaaagtggaccagtttttaacccaatcaaacattgaccatacggtaaacagctgcgcggttggcgagtacaaaagcgagttgagtggcgcggatatcatcatcgcttctacgcacattgcgggcgaaatcaccgtgaccggcaacaaatacgtggttggcgtgcgcaacatgctctctcctgccgactttggcccgaaactgctggaagtgatcaaagagcatttcccgcaggatgtgaagtaaggacgcgccatgaaattacgtgattcgctggcggaaaataaatccatccgcctgcaggctgaagcagagacatggcaggaagcggtgaaaatcggcgttgacctgctggtggcggcagatgtggtagagccgcgttactaccaggcgattctggatggcgttgaacagttcggtccttatttcgttatcgctccgggcctggcaatgccgcacgggcgtccggaagagggcgttaagaaaaccggtttctctctggtaacgctgaaaaagccgctggagttcaaccacgatgacaacgatccggtggatatcctcatcaccatggcggcggtcgatgccaatactcaccaggaagtgggcatcatgcagatcgtcaacctgtttgaagatgaagagaattttgaccgtttacgcgcctgccgtaccgagcaggaagtactggatctcattgaccgcaccaacgcggcagcttaagaaggaattgaacatgtcattaccgatgttgcaagtcgcgctggacaaccagactatggatagcgcctacgaaaccactcgcctgattgccgaagaagtcgacattatcgaagtgggcaccattctgtgcgtgggcgaaggcgtgcgtgcggttcgtgacctgaaagcgctctacccgcacaaaatcgtactggcagacgccaaaattgccgatgcaggcaaaatcctttcgcgtatgtgcttcgaagccaacgctgactgggtgacggtaatttgctgtgcggatatcaacaccgccaaaggcgcgctggacgtggcaaaagagtttaacggcgacgtgcagatcgaactgaccggttactggacctgggaacaggcgcaacagtggcgcgatgcaggcattgggcaggtggtttatcaccgcagccgtgacgcgcaggccgcaggcgtggcgtggggcgaagcggacatcaccgcgatcaaacgtctttccgatatgggcttcaaagtcaccgtcaccggaggcctggcgctggaagatctgccgctgttcaagggtattccgattcacgtctttatcgcgggccgtagtatccgtgatgccgcttctccggtggaagccgcacgtcagttcaaacgttccatcgctgaactgtggggctaaggagcggatatgttgtccaaacaaatcccgcttggcatctatgaaaaagcgctccccgccggggagtgctggctggaacgcctgcaactggcaaaaacgttaggcttcgattttgtcgaaatgtcggtagatgaaactgacgatcgcctgtcgcgcctcaactggagccgcgagcagcgtctggcgctggtcaatgcgattgttgaaaccggcgtgcgcgtgccgtccatgtgcctttctgctcatcgtcgtttcccgctgggcagtgaagatgacgcggtgcgggcgcaggggctggagattatgcgtaaagctatccagttcgcccaggatgtcggtattcgcgtgatccagctggcgggctatgacgtttactatcaggaagccaataacgaaacgcgtcgtcgtttccgtgacggcctgaaagagagcgttgagatggcaagccgcgcgcaggtgacgctggcgatggagatcatggattatccgttgatgagctccatcagcaaggcgctgggatacgcgcactatctcaacaatccgtggttccagctctacccggatatcggcaacctgtcggcgtgggacaacgatgtgcagatggagttgcaggccggaatcgggcatatcgtcgcggtacatgtgaaagacaccaaacctggcgtcttcaaaaacgtgccgtttggcgaaggtgtagtggatttcgaacgttgtttcgaaacgctcaaacagagtggctattgcgggccgtacctgattgagatgtggagcgaaacggcggaagacccggcggcagaagtggcgaaagcgcgtgattgggtgaaagcgcgcatggcgaaagcgggcatggtggaggcggcataatgcaaaagctaaaacagcaggtatttgaagccaacatggagctgccgcgctacgggctggtgacctttacctggggcaacgtcagcgctatcgaccgcgaacgcgggctggtggtgatcaagcccagcggcgttgcctacgaaaccatgaaagcggccgatatggtggtggttgatatgagcggcaaggtggtggaaggggagtatcgcccatcttccgacactgcgacgcatctcgaactctaccgtcgttacccgtcgcttggtggcattgtccatacccactccactcatgccaccgcatgggcgcaggcggggctggcgatcccggcgttaggcaccacgcacgccgactacttctttggcgacattccgtgtacgcgcgggttaagcgaagaagaggtgcagggcgagtatgaactgaacaccggcaaagtgattatcgaaacgctgggcaacgccgagccgctgcatacgccgggaattgtggtgtatcagcacgggccgttcgcctgggggaaagatgctcacgatgcggtgcataacgcggtggtgatggaagaagtggcgaaaatggcgtggattgcccgcggcattaacccacaactcaatcacatcgacagcttcctgatgaataaacacttcatgcgtaaacacggtcctaacgcttattacgggcagaagtagaacacgcgctgcggaaatttccttcctcgggagataactggtctaattccgcagccgtttttcaaaaaaaagccccctgcgaagggggcaaagcaaactatggcaatgtttcgttggttatacctggtgctagcgataaatatccgcgctggcgtgcatattgccgttactccccggttcccgcatcagaattacgtggtagtacgttgcgccttgcgcatctgtttcttcatttaatgcctgacgtgcttcgctttcagtggcgaaattatgattgatataaatcacgcctaagctttgcacatcgtccatatttctggcctggtggttattaatttcaatggctgcccatgtatttgcacttagcaaaagcacagccagaagggctaaaacacgactgaacatagatacctcctcgacggctgactttgtgtgctctcctctgtgatgatcttctgatttaattttaatcaatgataaagaagttgatggtgaccatttctgatgcagttgttcaaaaaaacaccatgatgaagtgtgatgaacttcaaatcagcgtgttagaggttaattgcgaaaggggagatttatttcggctctgcccttgagtttagcgaggcatacaagtactataacgcgtcatttttcagccgacctttaacacgttccttgcctccccgggattcggctgacccagacaggaggctgaataatccgtaaggagcaattcgatgcgtcattacgaaatcgtttttatggtccatcctgaccagagcgaacaggttccgggcatgatcgagcgctacactgctgccatcactggtgcagaaggcaagatccaccgtctggaagactggggccgccgtcagctggcttacccgatcaacaaactgcacaaagcacactacgttctgatgaatgttgaagctccgcaggaagtgatcgatgagctggaaactaccttccgcttcaacgatgccgttatccgcagcatggttatgcgtaccaagcacgctgttaccgaagcatctccgatggttaaagcgaaagacgagcgccgtgagcgtcgcgatgatttcgcaaacgaaaccgctgatgatgctgaagctggggattctgaagagtaatttctgatgaccaaccgtctggtgttgtccggcaccgtgtgcagggctccccttcgaaaggtcagtccatcaggaattcctcactgccagttcgtgcttgagcatcgttctgtgcaggaggaagccggctttcaccggcaggcgtggtgtcaaatgcccgttattgttagcggaaacgaaaaacaggccattactcacagtataacggtcggcagtcgcataaccgttcaggggttcatttcatgccacaaggcaaagaacggactgagcaaaatggttttgcatgccgagcagattgaattgatagattctggagactagccatatggcacgttatttccgtcgtcgcaagttctgccgtttcaccgcggaaggcgttcaagagatcgactataaagatatcgctacgctgaaaaactacatcaccgaaagcggtaagattgtcccaagccgtatcaccggtacccgtgcaaaataccagcgtcagctggctcgcgctatcaaacgcgctcgctacctgtccctgctgccgtacactgatcgccatcagtaatcggtcacggtccattaatacgactttgagaggataaggtaatgcaagttattctgcttgataaagtagcaaacctgggtagcctgggtgatcaggtaaacgttaaagcgggctatgctcgtaacttcctggtaccgcagggtaaagctgttccagctaccaagaaaaacattgaattcttcgaagctcgtcgcgctgaactggaagctaaactggctgaagttctggcagctgctaatgctcgcgctgagaaaatcaatgcactggaaactgttaccatcgcgtctaaagctggcgacgaaggtaaactgttcggttccatcggtactcgcgacatcgctgacgctgtaactgcagctggcgttgaagtggctaagagcgaagttcgtctgccgaacggcgttctgcgtaccactggcgaacacgaagtgagcttccaggttcacagcgaagtattcgcgaaagtgatcgtaaacgtagtagctgaataattcgttattcaacgagacgtaaaaacgccgaccattggtcggcgttttgctttctatttttcgtcaggtattagtttcgcaagtagatccattcaccattctcttgtgtccataagtcaggatggtttgctggcgttagatacatacgagcgcaactgatgtctcgctcctgcggcactcgctcgaaacccaaacccgagtagattgcggctgaacttgataaggaacgcagaccaattttcaaatcatggggtaaatcagaatacgcgtttagcaatgcagcaatgatgaatccgagggcattagaaacgcctgtaacagtgcgaagttggtcgatataaagatcgattgttggtagttcagatgaccagcaattaggcatttgggcaggaagggttacaacgtatcctatcgtttggccggtatagtctggagtaccataaccaggtcccaaaaccacttcgtgtattgtgtatttactgttgggttcgaaggattcgacatcttgcaataaatatttcagttctgcggttaacctcgcacccgcgtaagctttattgtatttctgggcgtgaatattatctaatgtagcttcatggttccatccaaaagaattatcaccattcattgtgattccatcgtaagcattacacctcgtcgctaacttattgaatgcttgccagtctgagagatctagtttgtggatctcaacagtacgtctgccatcgcaattatgatctcttccacgatttgaaagtaatgtagcgcgtgcgtattgatgaaattttaattttactggtttgtcggtggacgaaaaacgagataaatatgcaggaaatgaataaatagtcgttggtaatgtcattgtaatgttacctgtttaatgtttttataaatatcgcagctgaatgttcacagaaaaaaatcgatattaataaaaataagtttgttttctgaagtggtgaaaatagcggatggtgaaagatattaatatcaaaaatcgctcattatggatataacgatgcacccggggagaaaatgacttccacgccttacaccgtacattcttgttgtgcggtatgtaattattctacgctgtcggtatcggtgtattcgttaatcagcaggttagccagccacaaaaagccattgagaaaattattgattttacatgggattattatattgctaatccttggtttttaaaaattgtgcatagtgaaaatcaaagtaaaggtgtgcattatgcaaaatcacagcgtctcttagaaattaaccatgcgcacttgcagttaatggaatccttattggatgaagggaagaaacacaatatttttaagccagatatcgacccattgcaggtgaatattaatattgctgcgcttggcggatattatttgatcaaccagcatacgcttggcctggtttatcacatcagtatggtttcaccccaggcactggaagccagacgtaaggtcatcaaagagacaatccttagctggcttttggttgacccttcatctaccgcgcacgaataaaactgccatccggctggcgggtgaacaggacctgttgattattccccgtatcaatggttaagcccgtcaccacgccgctggcgttctggcggattttcaccatctgcccgttttgcaaattactcagcggcttacccgcgccttctacctgcgccattgcatagacatcggtagcgggcagtccgtggtcgcggaacagctgcgccatcgttttaccgggttcgacacggtaagagcgccattgattatcaattccgctatctggctggaatggttgcgtttgggtagtttgcggctgctcttctggctggccttcctgtataggttctggagcgaccggagccacctgatcaggatcattttgtggggtaactaattgcgcccgcagctgttcttctgtcggcggttgtgattgcgactgaatatctaactgcgcttcacgcgtcaccaccggcgcgttgggcgtatcatcagatggaagcagaaatccgaccaccaatacaatggcggcaataatgatcccccgacgatgcatcggcggcagcgggtccatgaagcgaaaattgtccggcgcgtgccagactttctccagggttggttttagttcaaagcgcccgggcatggtttcctcctgctccgcgtcttgttcctcaatcatagcctatgaataagctaacgctatgatgtccgtggtaaacccgcctttattatattcatacgggatattgctattgtttctttttccctgggatttgtcatcattcccgcgacaaagttttacccaaagaagtgtggctgatatgctgcccgctactttataccctaagaaaggaaatacgatgaccaccccaacttttgacaccatcgaagcgcaagcaagctacggcattggtttgcaggtagggcaacaactgagtgaatctggcctggaagggctgctgccagaagcactggttgcaggtattgccgatgcgctggaaggcaaacatccggctgttccggttgatgtggtgcatcgcgcgctgcgtgaaatccacgagcgcgccgatgccgttcgtcgtcagcgtttccaggcgatggctgctgaaggtgtgaaatacctggaagaaaacgccaaaaaagaaggtgtgaatagcaccgaatctggcctgcaattccgcgtgatcaaccagggtgaaggcgcaattccggcacgtaccgaccgcgttcgtgttcattacaccggtaaactgatcgacggcaccgtgtttgacagctccgttgctcgtggtgaacccgctgaattcccggttaatggcgtgatccctggctggattgaagcactgactctgatgccggtaggttctaaatgggaactgactatcccgcaggaactggcatatggcgagcgcggcgcaggcgcatccatccctccgttcagcaccctggtgtttgaagtcgaactgctggaaatcctctaagcagcgcattctgttcccctcgaacgagaggggagcaggcattcagcaataaacccttcagtttgccaaacggcgctattttgtgttgcaaagaccccgtaagcgtgtatttttgtgagctgtttcgcgttatcaccgtgatatgacactcactttaaacataaaattaacattagatctaaatcttagtattcatcccgcgtattgttacctaatatcgatgagtcccgatacagattcgtcgtatcatagactgactaaaggccgtagagcctgaacaacacagacaggtacaggaagaaaaaaacatggtagatcaggtaaaagtcgttgccgatgatcaggctccggctgaacagtcgctacggcgcaatctcacaaaccgacatattcagcttattgccattggcggtgccattggtacggggttgtttatggggtctggcaaaacgattagccttgccgggccgtcgatcattttcgtttatatgatcattggttttatgctctttttcgtgatgcgggcaatgggggaattgctgctttcgaatctggaatacaaatcttttagtgacttcgcttccgatttactcgggccgtgggcaggatatttcaccggctggacttactggttctgctgggttgtaaccggtatggcagacgtggtggcgatcacggcttatgctcagttctggttccccgatctctccgactgggtcgcctcgctggcggtgatagtgctgctgctgacgctcaatctcgccaccgtgaaaatgttcggtgagatggagttctggtttgcgatgatcaaaatcgtcgccattgtgtcgctgattgtcgtcggcctggtcatggtggcgatgcactttcagtcaccgactggtgtggaagcgtcattcgcgcatttgtggaatgacggcggctggttcccgaaaggtttaagtggcttctttgccggattccagatagcggttttcgctttcgtggggattgagctggtaggtacaacagctgcggaaaccaaagatccagagaaatcactgccacgcgcgattaactccattccgatccgtatcattatgttctacgtcttcgcgctgattgtgattatgtccgtgacgccgtggagttcggtagtcccggagaaaagcccgtttgttgaactgttcgtgttggtagggctgcctgctgccgcaagcgtgatcaactttgtggtgctgacctctgcggcgtcttccgctaacagcggcgtcttctctaccagccgtatgctgtttggtctggcgcaggaaggtgtggcaccgaaagcgttcgctaaactttctaagcgcgcagtacccgcgaaagggctgacgttctcgtgtatctgtctgctcggcggcgtggtgatgttgtatgtgaatcctagtgtgattggcgcgttcacgatgattacaaccgtttccgcgattctgtttatgttcgtctggacgattatcctttgctcgtaccttgtgtatcgcaaacagcgtcctcatctacatgagaagtcgatctacaagatgccgctcggcaagctgatgtgctgggtatgtatggcgttctttgtgttcgtggtcgtgttgctgacactggaagatgacactcgccaggcgctgctggttaccccgctgtggtttatcgcgctggggttgggctggctgtttattggtaagaagcgggctgctgaactgcggaaataaccgcattatcatgctggatggcgcaatgccatccagcttttagatcactcacccgccagcgcgcgtgggaacagtacattgttttccagactgatgtgatccatcaggtcatcaatcagttcattaatgccgttatacatcgctttccaggtggtgcaggcttctggcggcggtgtgacgttattggtggtgtgtttaatcacttccagcagttcgcccgcttcatcgtgctcgctttccattacgctgattggccccattgcctggctgcccatgccttgtttgatcatcgggaagaggatctgctcttctttcatcatgtggctggaaagctcttcatgcagcatggtcaggtattttgtcagcccttttggcacgctcggtttgtcggcgtgaacgcgctcgactttagtcgcttgcagaatcagctccggcagttgctcgcggtgacgatcgtggtagcgcacgatgatatggtcgatgatttctgccagcggggcgctacgccagtctttctcaatcggttgttcagcgagctttgccagttcagcttcaatgacctcaacatccagttctttacgtgccgccgcgcgcgccagcgtctgcttaccgccacagcagtaatccatatcatatttacgaaacagagctgaagcgcgaggaatagagagcgccagttcacctaaaggttggtcgcgataagccatagctgatacctcattcttaataagataagatgtattttaaatgcatctttaaggcaaaagctataacccttacgtagcagaggcttatttaactcactgccagcgtgtcaactttctgagacagattcagttaaaggtttttctggttttgctctgaccgcgatgaccacgccaatcactaacagcgcgataccgctcagcgtcattagcggcggcatttgctggcggagtaaaaaggtgtacagcaaacctgccagcgtttcgaaaacaatcagcggcccgagaatcactgtcggtaatagctggctggcgacgttccagcagagtgcgccaacccatgagcaaagcacggctatcgcaaccatcagactaataaacaccagcggacgggggccaaagggtagggagaagtccggcgtttgcgtattcagccagtaacaagcgacgagatagccgataagtgaaaccggcagtgtgaccagcgcctgcgctgttgcccacatcatcggatgtttgtcgggattttcccgcagccagcgggcgttgcgcagggcataccacgcccagcagaccacggaaactaacgccagcacgatgccagaggtataacgtgcccagtcaaaatcggggagtccgtggtttaactcagcaatattcacacacgccaggccgatgccaatacaaatcagtgctggggcgagttttccccacgcgagtttgccgtcgcgctggctataaagcagattggcaaagacaggaatgaccaccggcagggtgccgataatcatcgtggaaacaggcgcgccagtacgttgaatggcactggcaaggcagaagtaatagatgaggttgcccatcatagtgagcatcaaggcggtaagccagtcgcgacgcgccaactgacgcagacgcacgcgtcccagccaggcaatgggcagcgcaattaaccctaacgccagataacgccccatcgactgcaacatcgccgggtattccggcacgatcaacggcccgacaaaaataagcccccacatcaaccctgctaacagggcgtacagcacgccgctaatcattactggcatccattgatctgtcagaagaaagttcaggaagcagacatgattgctcccggcatcccgtcattatcagagaggatgcgggaggatgccactttaattaactagttattaacattaaaaagatggcttacgctttcggctaacgttgtcgttgggtggccaatcaatttgctaagtgttttgctgtcatcaaacagaccgcctttcgatgcgccaacgtcagaatccgccagcatatccgccagtccgtcgggcagtccgacgcttttcagtgccgcggcgaaatcggcttcgctcagattttgataggtaacctgtttgccgctctgtttggtcagctctgccgctaactgtgtcaacgtccaggcactatcgcccgccagttcgtaaaccttgccttcgtgaccggcttcgctaatcacgcgtgccgcagctgccgcataatctgcccgcgttgctgaggcgattttgccatcgcccgccgcaccgataaatacgccgtgttccagtgctgccggggcgctggcgaggtagttttcgctgtaccagccgttgcgcagcagggtgtaaacgatgccagaatcagccagcattttctccgtctcgatgtgctcatcggcgaggccgagcggggaggtatctgcatgtagcaggctggtataagcgataaatttcacgccagccgcctttgcggcattaataacattacgatgctgcggggcacgttgacccacttcgctggaagagatcagcagtagtttttccactccctgaagtgcagatgtcagtgcggcttcatcgccgtagtcagcctgacgcacggtaatgccttgtgctgccagggcttgggcttttgccggattacgaacgatagccactatttggctggcaggaaccgttttcatcaaggattcaataacatagtgaccaagttggccagtggcaccagtaatagcgatcatgggaagtctccatcgttttgtcttgtgtttaaatacgctaacacctaaacttacttttagtaagtacgtacaaaaaggtaagtatgaaatgagtcaggttagcctgtcgcaacaactgaaagagggtaatctctttgcggaacagtgcccgtcgcgcgaggtgttgaaacacgtcaccagccgttggggggtgttgattctggtggcgctacgcgaaggtactcatcgctttagcgacctgcggcgcaaaatcggtggggtgagtgaaaagatgcttgcgcagtcgttacaggcgttagaacaggatggttttcttaaccgtatcgcgtatccggtggtgccgccgcatgtggaatatagcctcacgccgctgggcgagcaggtgagcgaaaaggttgctgcactggcggactggattgagttgaatttgcccgaggtgttggcggtgcgggatgaacgtgcggcataactgccggatgcgctgagcttatctggtctacggtgcatggcttgtagggcggataagatgcgccagcatcgcatccgccaataaatgccggatgcggttgatgatttataggccgaaaaagaagtgttttacttactcaaatccacctgataaatcgcaaacccgatatcatcggtcgcgactttattcatcggatactgccctttctctttaataaacgctgcggctttatctgacggagaggtttcgaaacggatatccagtttcttatcgccagctatcggtgctaaacgccagttgttatctgccgccgggtgaatttcccccgcacgtttcgactcatcagcaatccacgctgccagcaccgagcggttctcatccggtgaagcaaaagcgatatggctgtcgcccgtaccggcaaatttgccgccgtaagcgcgatagttattggtggcaaccaggaacatggcgttcggatcaatcggcttgccattaaaggtcaggttcttaatcctttccgcattggcattaatcatctggcactcgccgtcataacgggcgggctgggtaacatcaatctgataattcacaccatcaataacatcaaagttataagtgcggaaaccatcccagttgatgagtgactgtggtttcgtgctgttgggatcaatctggttaaactgtcccgcggagcactccagccactctttcacctctttaccgctggctttcaccacaatcagcgtattgggatagagataaagatcggcggcattacggaaggtcaactggcctttttccacctccacatagcttgccgggtcatttttgcgaccaccgactttaaacggtgcggcagctgaaagcaccggcagttttgccagatccggatcgccctgaatgtaatgctcgacatacgctttttgcgcgttgttcaccacctgcacggtcggatcgtcctgcaccagcgccagatagctatacatattgtcggcagatttaccgattggcttgctgacgaactggcgtgtggcatcgtgatcggctttgagtgtttctaccagcttgctgtcttccgccgcgagggattttttattagcgatgtcgtaaatcggtcgtgcttccgctttcgcctgcgtcacctgccatttaccgctgtcattactgagttgtaagtcgaccacaccaagatgatcgccccacatgcctggcattaccgccggaacaccattcagcgtgcctttggcgatatcagccccttcgatatcagcaaaatctttacctgggaaaacggcgtgagcatggccaaacataatggcgttaacgcccggaatttcactgaggtaataaactgagttttccgccatcactttatacggatcggcagatagcccggaatgtgccagaacgacaacaacatcggcacctttctcgcgcatttcaggcacgtatttgcgcacggtttcggtaatatcattcaccgtcactttcccggataaattagctttatcccagcccatgatttgtggtggcacgacgccaatatagccaatcttcagcgtctgtttttttccgtctttatcgaccacttcggtgtctttaattaaatacggtgtaaacattggctgtttggttctggcgtcaatgacgttggcatttacataagggaatttcgctcctgccagcgcatttttcaggtaatccagaccgtagttaaactcgtggttgccaagcgttccgacggtatagtccagcgtatttaatgccttatagaccgggtgaatatcacctgcttttaatcctttcgccgacatgtaatcggccagcggactcccctgaatcaaatcgccgttatcaaccagtacgctgtttttcacttcattgcgggcatcgttaatcaggcttgccgtacgtaccagtccgaatttttccgtggcggtgtctttgtaataatcgaaatccatcatgttgctatgcagatcagtggtttccatgatacgcagatcgaccgtcgctgcattcacactggcggcaatcagcgtggccaggagcgttgcgctaaacttaatcatcagggacatccttttatcatcgggaatacgaaagaaaagggagaataaacgtcttacttatagaacagtgaagaatgccacaattttacgctttgaaaatgatgacactatcacagttggcgcattcattaacgatagggtataagtaaaacaataagttaacaccgctcacagagacgaggtggagaaatgttagatcaagtatgccagcttgcacggaatgcaggcgatgccattatgcaggtctacgacgggacgaaaccgatggacgtcgtcagcaaagcggacaattctccggtaacggcagcggatattgccgctcacaccgttatcatggacggtttacgtacgctgacaccggatgttccggtcctttctgaagaagatcctttcggttgggaagtccgtcagcactggcagcgttactggctggtagacccgctggatggtactaaagagtttattaaacgtaatggcgaattcaccgttaacattgcgctcattgaccatggcaaaccgattttaggcgtggtgtatgcgccggtaatgaacgtaatgtacagcgcggcagaaggcaaagcgtggaaagaagagtgcggtgtgcgcaagcagattcaggtccgcgatgcgcgcccgccgctggtggtgatcagccgttcccatgcggatgcggagctgaaagagtatctgcaacagcttggcgaacatcagaccacgtccatcggctcttcgctgaaattctgcctggtggcggaaggacaggcgcagctgtacccgcgcttcggaccaacgaatatttgggacaccgccgctggacatgctgtagctgcagctgccggagcgcacgttcacgactggcagggtaaaccgctggattacactccgcgtgagtcgttcctgaatccggggttcagagtgtctatttactaaattcagatggcagaaacagtgtatttcctgattctgccatcctgatttctcccaacctaaaaagttataaataaaaagagattgtatttaaagtgcaaaaattcaattgctaataagttacattttaataatgagcgttttttgatagtttacttctatagtgagatatttaatggcgacataaagtaaccaaataaaataaggttgtcatatgttacccaggatcagacacaataattttattggtgcggtggagttatttgtaaagtcttcgtatacaaaaacacattcaaacaatttttttaacaacatccatcatgcatttaagaaaaaagattggatttcgaattatgatagcctgttaactttgagggagttctttcgttgcgcaactcagattgataaaagtggttatcaggtgctttcatcaaaaaatgaaactgttcacgccatggataagtttcttatcagtttcagccttaaagataacggtgccgaatatacaatgacattgcgaggtagtggatttgaatacgaagaaatacccataacaataaatgaatataactcattcatggatttcaaaaaccgtgaatttccgttagaacaaaacagacgattgtatgcctgggatattctacagaaaaaacagtctgacataccgaaaaggattaaaggttatattcaccaggcgattggtgacgtgtctttaggttatgccttattggaggatatagtaagcaaattaaaacggggtaaatttgaactccaaataccaggaggtggaattaaagaatgcgatggatggtatatttacgaaaaaataattgatgataattttgccatagtcatagaatctttgggctttgcgcttaaaatctatggaggggatgaacgttttcgtaatggttcctctgttgttttggaggatgaagattactctcttatttataattttctggttaatgcaggttgccaacaagtcgaattagccgaacaagtggatgcgatagtaagtgcgaatctggccgcagatagcgatattaccaaagaaaagatttgcgagaaatataaatcgaccattgaggcgtttaaaaaagagcaactagcgttaccagtattagttcggcgtaagaactcagagacttaattcccctatcccatagataacgataggggaaaattatttttgcagaatttatgttattgccattatttgagcaacttttgcagcaggtccatcacttgctgcacctcttccggtgtgagcgccccgtctttggcccattgcacgcgaccatccttatccagcaccactacagcggaactttcttcatccagctgccaggcaccgagcgcgacgccattgctatcgacaataaactgcgaccagggataaagctttttattactctccagactgctgcgcacaaacatccctgaacccggaatcgcgtcgtcggtgttaacaatggtggtggtctggtaacgatcgtgcggtaacttcgctgatttaatcgcttcaatcagcgtcgcgtttttctcttttgcagaggtgcgaccagcaatatgttgcagtactcgcacttttcccactaactgcgcgctgttccaggttttgtagctaaactgatctttatcaagcaccaactcgccccgatcggtaatgccaatcggcggcactcgctgaccggtttcgaactgatgtgcggaagccatcatcggcaacagcaggcaggtgagtgccagaatcttgcgtagggtcatggtgtttccttcttatgatatgcaggtgatccgaccacttgggtctgagttttaatcatatgtgctatttatcgaatttcccgcaagtgtgatgccagtttgcggtcaagcgcacaaatcatatgaaaaatgaatgcttatactgaagaccgcgcttcggtaaaaagataattctgaataattgtaacctttaggtaaaaaaagttatacgcggtggaaacattgcccggatagtctatagtcactaagcattaaaatttgcgcctcataatagttgggccgattgtggcaccgcacaggcgtaatactcagcaggagataacaatgaaaattttccaacggtacaacccacttcaggtggcgaagtacgtaaagatcctgttccgtggacggttatacatcaaggacgttggcgcttttgaattcgataagggtaagattcttatcccaaaagtgaaggataagctgcatttgtcagtgatgtccgaagttaaccgtcaggttatgcgtctgcaaacagagatggcttaaccaaagtgctatgcagtaaaaagtgctatgcagtaataagacggctcctgattcaggagccgttgatgtttctgggggttacgcgacgctttcttctttatctttagcgtcaggcagttttggcgaaagggcggtggccttgctgtcgatccgggtcaccagcagctggtcgatgcggtagttatcgatatccaccacttcaaatttgtagccggcgaatttcaccgaatcggtgcgtttcgggatcttacgcagcataaacatcataaagccgccgatggtttcgtagttgcccgactgcgggaactcgtcaatatccagcacgcgcatgacgtcgtcaattggggtgccgccgtcaatcagccatgagttctcatcacgggcgacaatctgctcttccagcccctgaccgaccagatcgcccatcagcgtggtcatcacgtcattgagggtgatgatccccaccaccagcgcgtactcgttcatgatcaccgcgaagtcttcacctgcggttttaaaactttccaacgcctctgaaagggttaacgtatccggcacaatcagcgtgttgcgaatttgtacgccgctgttcagtgccaggctttggttagccagcacgcggttcagcaggtctttagaatcgacataaccgatgatgtggtcaatatcttcattacagacgaggaacttagagtgcggatgttccgccaccttattcttcaggctttgctcatcttcgtggagatcaaaccaaatcacgttttcacgcggtgtcattgaagacggaacggtacgggattccagctcaaagacgttttcaatcagctcgtgttcctgtttacgtaacacgcccgccagcgcaccggcttccactaccgcgtagatgtcatcagaagtgatgtcatctttacgtaccattggcagtttgaaaatacggaagattatgttcgccaggccgttgaagaaccacaccagcggggtgcaaacgtacaggcagaagcgcatcgggttgatgatacgcaaagccacagcttctggcgcaatcataccgatgcgtttcggggttaaatccgcaaacaggataaacatgccagtcactaacgagaaagagagaataaagctcagttgctcagagagctctgccgacatatagcgggagaacaggctgtgaaaagctggagaaaatgccgcatcaccgacgataccgccgagaatcgccactgcgttcagaccgatttggaccacggtaaagaacatgccgggattttcctgcatattcagaacgcgttgggcatttatattgccttcatcagccagcagtttaagtttgattttgcgtgaggcggcaagcgagatctcggacatcgagaagaacgcacttacagcgatcaagcagagtatgactaaaatactgtttaacatatcttatccgacctttcaggccagatcctcggaaggggaagttgattaatttgtgtgaaatacacattgaaagccgattcgaagaaagtgaaccggcattttcagtggctagtatagcgtaaggtactgtaaagccgccagagggttaaaattcagacagctgaaaaatgcaaaactgcctgatacgctatgccgatcaggcctacgcagtccttgcaatatattgaatttggacgattttgtaggcctggtaagtcgtttacgccgcatcaggcatagacaaagagcactttatcaacaaactacatttgtacccgtaacgctatgcttccggcggcagacagacgccaattccgccaattccacagtaaccatacgggtttttatgcagatattgctggtggtcatcttcggcataataaaacggtgtggcgttagcgatttccgtggtgatgtgacgatcgtcatcggcggcaagcatcgccgcctgaaaacgttccagactggcgcgagctgcggcatcctgttctggggtcagcggataaatcgctgaacgatactgcgtgccgtggtcattgccctgacgcattccctgggcgggatcgtgattctcccaaaatacctgtagcaactgctcatagctgatgacggaaggatcgtaaacaatgcgtaccgcttcggcatgacccgtatcaccggagcacacttcccgataagtcggatttggcgtatagccgccggtatagcctgcggcggtgctgtaaacgccgggtaactgccagaacagacgctccacaccccagaaacaacccatcgcaaaaatggcaatctccattccgtcaggtacattggtcattgagtgaccgttgaccgcatgcagcgtggctacgggcatcggggtgttacgtccaggcagggcatcggcgggggaaaccagatgctttttatcaaataaactcatggtgtcgctctcccgaaaatcggtcattggggttaaggttgtaacaagaggcgtatttgcacacaataaccaccgtgaataggtctaaagtaaaacataagaaatatttggggtttagtctgctttttaatccatattactggatttttgttaagccgtttaacggcgttccaggggcaggaaaaaaggatattcaggagaaaatgtgcgctatatccgacagttatgctgtgtaagcttactctgcttaagcggatctgccgtcgccgcgaacgtccgtctacaggtcgaggggttatcgggacagctggaaaagaacgttcgtgcgcagctttctacgattgaaagtgatgaagtgacgccagaccgtcgctttcgcgcacgcgtcgatgatgccatccgcgaaggtctgaaagcgctgggttattaccagccgaccattgaatttgatctccgtccaccgccaaagaaagggcggcaggtattgatcgccaaagtcacgccaggcgtgccggtgttaattggcggcaccgatgtggtattgcgcggcggcgcgcggaccgataaagactatttgaaattgctcgatactcgcccggctattggcacggtactgaaccagggcgattatgaaaatttcaaaaagtccttaaccagcattgcgttgcgtaaaggttatttcgatagcgaatttaccaaagcgcagctgggcattgcgctcggcctgcataaagccttctgggatattgattataacagtggcgaacgttaccgctttgggcatgtgacctttgaaggatcacaaatccgcgatgaatacctgcaaaatctggtgccgtttaaagagggcgatgagtacgaatcgaaagatctggcagaactgaaccgccgactttctgctaccggctggtttaactcggtggtggtggctccacaatttgataaagcgcgcgaaacgaaagtattaccattgacgggcgtggtttcgccgcgaacagaaaacaccatcgaaaccggggtcggttactctacggacgtgggaccgcgcgtgaaagcgacgtggaaaaagccgtggatgaactcttatggtcacagtctgaccaccagtactagtatttccgcgccggaacagaccctcgacttcagctataaaatgccgctgctgaagaatccactggaacaatattatttggtgcagggcggttttaagcgcactgacctgaacgataccgaatctgactccactacgctggtggcttctcgctactgggatctctccagcggctggcagcgtgccattaacctgcgctggagtctcgaccactttactcagggtgaaattaccaataccacgatgctgttttatcctggggtgatgattagccgcacgcgttctcgtggtggcctgatgccaacctggggcgactcgcaacgctactctatcgactactccaacacggcctggggttcagatgtcgatttctccgttttccaggcgcagaacgtctggatccgcacactgtacgatcgccatcgttttgttacacgcggcacgctgggctggattgaaaccggtgatttcgacaaagtaccgccggatctgcgtttcttcgccgggggcgaccgcagtattcgtggctacaaatacaaatctatcgctccgaaatacgccaacggtgacctgaaaggggcctcgaagttgataaccggatcgctggaataccagtacaacgtgaccggaaaatggtggggcgcggtgtttgtcgatagtggcgaagcggtaagcgatattcgccgcagcgactttaaaaccggtaccggggtcggcgtgcgctgggaatcgccggtcgggccaatcaaactcgattttgccgtaccggtcgcggataaagacgaacacgggttacagttttacatcggtctggggccagaattatgagtttatggaaaaaaatcagcctcggcgtggttatcgttatcttactgttgctgggatcggtggcgtttctggtgggcaccaccagcggcctgcatctggtatttaaagcggcggatcgctgggtgccaggactggatattggcaaggtcaccggcggctggcgcgatctcaccttgtctgacgttcgttatgagcagccaggcgtggcggtaaaagcgggcaatctgcatctggctgtcgggcttgagtgcctgtggaacagcagtgtttgtattaatgatctggcgctgaaagacattcaggtcaacatcgacagtaaaaaaatgcctccttctgaacaggttgaagaagaggaagatagcggtccgctggatctctccacgccgtatcccatcaccctgacacgggtggcactggacaacgtcaacattaagattgatgacaccacggtatcggtgatggacttcacctccggcctgaactggcaggagaaaaccctgaccctgaaaccgacgtcgctgaaaggcctgctgattgctctgccgaaagtggcggaagtggcgcaggaagaagtggtcgaaccgaaaattgaaaatccgcagccggatgaaaagccgctcggcgaaacgctgaaagatctcttttctcgcccggtattgccggaaatgaccgacgtgcatttgccgcttaacctgaacattgaagagtttaagggcgagcagctgcgcgtgacgggcgacacggacatcaccgtgagcaccatgctgctgaaagtgagcagcattgacggcaatactaaactggacgccctggatatcgattccagtcaagggatcgtcaacgccagcggcacggcgcagctgtcagacaactggccggtggacatcactctcaacagtacactgaacgtggagccgttgaaaggtgaaaaagtgaagctgaaaatgggcggcgcgctgcgcgaacagctggagattggcgttaatctttccggtccggtggatatggatttacgcgcccagacgcgactggcggaagccggattgccgctcaacgtggaagtgaacagcaaacagctttactggccgttcactggtgagaagcagtatcaggcggatgatctgaaactgaaacttaccggcaaaatgaccgattacacgctctctatgcgtacggcagtgaagggacaggagatcccgcccgcgactattaccctcgacgccaaaggtaatgaacagcaggtcaatctcgacaaactcaccgtcgcggcgctggaagggaaaactgaactcaaggcgttgctcgactggcaacaggccattagttggcgcggtgagctaacgcttaacggcattaacaccgccaaagagttcccggactggccgtcgaaactcaatggcttgattaaaacccgcggtagcctgtacggcggcacctggcagatggacgtgccggagttgaagctgaccggtaacgttaaacagaacaaagtgaacgttgacggcacgctgaaaggcaacagttatatgcagtggatgatcccagggcttcatctggaactcgggccaaacagtgccgaagtgaaaggcgagctgggggtaaaagatctcaatcttgatgccaccatcaacgcgccggggctggataacgcgctgccggggcttggcggtacagcgaaagggctggtgaaagtacgcggcacggtggaagcgccacaactactggcagatatcaccgcgcgcggcctgcgctggcaggaactttccgtggcgcaggttcgcgtggaaggcgatatcaaatccaccgatcagatcgccgggaaactcgacgtacgcgttgagcaaatttcgcagccggatgtaaatatcaacctcgtcaccctgaatgccaaaggcagcgaaaagcagcacgagctacagttgcggattcagggggagcctgtctccgggcagcttaatctggcaggaagttttgatcgcaaagaagaacgctggaagggaactcttagcaatacccgcttccagacgccggttggcccgtggtcgctgacccgcgatattgcgctggattaccgcaataaggagcaaaaaatcagcatcgggccacactgctggcttaacccgaatgcggaactgtgcgtgccgcaaactatcgatgcgggggccgaagggcgtgcggtggtgaatctcaaccgcttcgacctcgccatgctgaaaccgtttatgccagaaaccactcaggccagcggtatcttcacgggtaaagcggacgttgcctgggacaccacgaaagaggggctgccgcagggcagtatcaccctttcggggcgtaacgtgcaggtaacgcaaaccgtcaacgatgcggcgctgcccgtggcgtttcagacactgaatctgacggcggaattgcgtaacaaccgtgccgaattgggctggaccatccgcctgaccaataacggccagtttgatggacaggtgcaggtgaccgatccgcaaggccgccgtaatcttggtggcaacgtcaatatccgtaacttcaaccttgcgatgataaaccccatctttacccgtggggaaaaagcagcggggatggtgagtgccaacttgcgtctgggtggtgatgtgcaaagcccgcagttgtttggtcagcttcaggttacgggtgtggatatcgatggcaactttatgccgtttgatatgcaaccgagccagcttgcggtcaactttaacggtatgcgctcgacgcttgccggtacagtacggacccagcagggtgaaatctacctgaacggtgatgccgactggagccaaattgaaaactggcgggcgcgggtaacggcgaaaggcagtaaagtgcggatcaccgtgccgccgatggtacgaatggatgtatcgccagatgttgtattcgaggctacaccaaacctgtttaccctcgatggtcgcgtggatgtcccttgggcgcgcatcgtggtgcacgatctgccggaaagcgcagtaggcgtctccagcgatgtggtgatgcttaacgataacctgcaaccggaagagccgaaaacggcgtcgattccgattaacagtaacctgattgtccacgttggcaacaatgtgcgcattgacgcctttggcctgaaagcgcggctgacgggcgatctcaatgtcgttcaggacaaacaagggctgggtctgaacgggcagatcaacatccctgaagggcgcttccatgcctatggtcaggatctgattgtgcgtaaaggtgagttactgttctctggtccgccagatcaaccgtatcttaatattgaagctattcgtaacccggatgctacagaagacgacgtaatcgccggagttcgcgtcactggtctggcggacgaaccgaaagcggagatcttctctgacccggcgatgtcgcaacaagctgccttgtcttatttgctacgtggacaagggctggagagcgatcagagcgacagtgcggcaatgacctcgatgctgattggtttgggggttgcgcaaagtggccagattgtgggtaaaatcggcgagacgtttggcgtaagcaatttagcgctcgacacccagggagtaggcgactcctcccaggtagtggtcagcggctatgtattgccaggtctgcaagtgaaatacggcgtgggtatatttgactctatagcaacactcacgttacgttatcgcctgatgcctaagctatatctggaagccgtgtctggtgtagaccaggcactggatttgctctatcagttcgagttttagcaatgcgaatatttgtctacggcagtttacgccacaaacaaggcaacagtcactggatgaccaatgcccagttactgggcgatttcagtatcgataactaccagttgtatagcctgggccactatccaggcgcagttccggggaacggaacggtacacggtgaagtttatcgtattgacaacgccacgctggccgaacttgatgccttgcgcaccaggggcggtgaatacgcgcgccagttgattcagacgccgtacgggagtgcatggatgtacgtttatcaacgacccgtcgatggattaaagctaattgaaagcggcgactggttagacagggataagtaaccatatgcatacgccaccttcgggtggcgttgttttttgcgagacgactcgcattctgttttgtaattccctcaccttttgcttttctctccgagccgctttccatatctattaacgcataaaaaactctgctggcattcacaaatgcgcaggggtaaaacgtttcctgtagcaccgtgagttatactttgtataacttaaggaggtgcagatgcgtattaccataaaaagatgggggaacagtgcaggtatggtcattcccaatatcgtaatgaaagaacttaacttacagccggggcagagcgtggaggcgcaagtgagcaacaatcaactgattctgacacccatctccaggcgctactcgcttgatgaactgctggcacagtgtgacatgaacgccgcggaacttagcgagcaggatgtctggggtaaatccacccctgcgggtgacgaaatatggtaaagaaaagtgaatttgaacggggagacattgtgctggttggctttgatccagcaagcggccatgaacagcaaggtgctggtcgacctgcgcttgtgctctccgttcaagcctttaatcaactgggaatgacgctggtggcccccattacgcagggcggaaattttgcccgttatgccggatttagcgttcctttacattgcgaagaaggcgatgtgcacggcgtggtgctggtgaatcaggtgcggatgatggatctacacgcccggctggcaaagcgtattggtctggctgcggatgaggtggtggaagaggcgttattacgcttgcaggcggtggtggaataaggtgtgtttatttatcgcgggcataaaaaaacccttactaaccgaagcccggcgttcagggttattacgccagaagaacttatttattctttgcgcgctcgaaggaggcaacgatttcagctttagcggcttctgcgttttcccaaccttcaactttcacccacttgcctttttcgaggtctttgtagtgctcgaagaagtgagcgatttgcgctttcagcagttcaggcagatcgttaacgtctttaatgtgatcgtattctttgctcagcttgctgtgcggaaccgcaaccagtttcgcatcttcaccggcttcgtcggtcattttcagaacgccaaccggacggcaacggatcacagaacccggctgcagcgggtacggagttgggaccagtacgtcaaccgggtcaccgtccagagacagggtgtggttgatgtaaccgtagttgcatggatagaacatcgcggtggacatgaagcggtcaacgaacagtgcgccgctctctttgtcgatttcgtatttgatcggatctgcgttagccgggatctcaataacaacgtagatgtcttccggcagatctttacccgcagggacgttgagtaagctcatgtctgtttcctttaaaaatatgtggcaaacaagtgccgagtattatagccaactcgcgccgaatgtcttcgcttgttttcgtcttcattttcctttttcaccagttttaagacggtatacagagcaggaaaatccataaccgtagccgcatttttcatagtgagatgaaagcgattacaaacttgtgattaacgttttatttacttttttgaagtgtgatgtaacgcaatctgttacataacgaattgtctatagttttttcgcgaacatcttttaaccaataataactaccccgacgaggacaaccctatgtggaaacgcttacttatagtctctgcagtctcggcagccatgtcgtctatggcgttggccgctccattaaccgttggattttcgcaggtcggatcggaatcaggctggcgtgccgcagaaaccaatgtggcgaaaagtgaagccgaaaagcgcggaatcacgttgaaaattgccgatggtcagcaaaagcaggaaaaccagattaaagcggtacgttccttcgttgcacaaggggtggatgcgatctttatcgctccggtggtcgcgacaggttgggaaccggtattaaaagaggcgaaagatgccgaaatcccggtattcttgctcgatcgttccattgatgtgaaagacaaatctctctatatgaccaccgtcactgccgacaacatcctcgaaggcaagttgattggtgactggctggtaaaagaagtgaatggcaaaccatgcaacgtggtggagctgcagggcaccgttggggccagcgtcgccattgaccgtaagaaaggctttgccgaagccattaagaatgcgccaaatatcaaaatcatccgctcgcagtcaggtgacttcacccgcagtaaaggcaaagaagtcatggagagctttatcaaagcggaaaacaacggcaaaaacatctgcatggtttacgcccataacgacgacatggtgattggtgcaattcaggcaattaaagaagcgggcctgaaaccgggcaaagatatcctcacgggttccattgacggtgtaccggacatctacaaagcgatgatggatggcgaagcgaacgccagtgttgaactgacgccgaatatggcaggtcccgccttcgacgcgctggagaaatacaaaaaagacggcaccatgcctgaaaagctgacgttaaccaaatccaccctttacctgcctgataccgcaaaagaagaattagagaagaagaaaaatatggggtattgagggttgctatgcctgatgccgattcgtaggccggataaggcgctcgcgccgcatccggcgatggtgcactgaagcctgatgcgacgcttaccgcgtcttatcatgcctactgggagcacgctttacaccgggggaaaccatgacgaccgaccaacaccaggagatcctccgcaccgaaggattaagtaaatttttccccggcgtcaaagcgttagacaacgttgatttcagcctgcgccgtggcgaaatcatggcgctgctcggtgaaaacggggcgggaaaatcaacgctaatcaaagcattaactggtgtataccacgccgatcgcggcaccatctggctggaaggccaggctatctcaccgaaaaataccgcccacgcgcaacaactcggcattggcaccgtctatcaggaagtcaacctgctacccaatatgtcggtcgctgataatctatttataggccgcgaacccaaacgcttcggccttctacgccgcaaagagatggaaaagcgcgccaccgaactgatggcatcttacggtttctccctcgacgtgcgcgaaccgctcaaccgcttttcagtcgcgatgcagcaaatcgtcgctatttgtcgggctatcgatctctctgccaaagtgctgatcctcgatgaacccaccgccagtctcgacacccaggaagtggagttactgtttgacctgatgcgtcagttgcgcgatcgcggcgtcagcctgatttttgtcactcactttctcgatcaggtctatcaggtcagcgatcggatcaccgtcttacgcaacggcagtttcgtaggctgtcgggaaacgtgcgagctaccgcagatcgaactggtaaaaatgatgctggggcgcgagctggatacccacgcgctacagcgtgccgggcgaacattgttgagcgacaaacccgttgccgcgttcaaaaattacggcaaaaaaggaacgatcgcaccgtttgatctcgaagtacgccccggcgagatcgtcggtctggctggattgctgggatcaggacgtaccgaaaccgccgaagtgatcttcggtatcaaacctgctgacagcggcacggcgttgatcaaaggcaaaccgcaaaacctgcgatcgccacatcaggcttcggtactgggcattggcttctgcccggaagacaggaaaaccgatggcatcatcgctgccgcctcggtgcgggaaaatatcatcctcgctctccaggcccagcgcggctggctacgtcccatttcccgcaaagaacagcaagagattgccgaacgctttatccgccagcttggcattcgcacaccttcaactgaacaaccgattgaatttctctccggcggcaatcagcaaaaagtgttgctttcacgttggctactgacccgaccgcaatttctgatcctcgatgagccaacccgcggcattgatgttggtgcccacgccgagatcatccgcctgattgaaacgctatgcgccgatggtctggcgctgctggtgatctcctccgaactggaagagctggtgggctatgccgatcgggtgattatcatgcgcgatcgcaaacaggtggcggagatcccgctggcagagctttccgttccggcgatcatgaacgccattgcggcgtaaggagaacagtgtgatgcctcaatctcttccggacaccactacgccaaaaaggcgctttcgctggccgacggggatgccgcagctggtagcactattgctggtgctgctggtcgatagcctggtagccccgcatttctggcaggtgtactgcacccattttgttggacgatgaaatggaatagcccctaatatgtcaaagccaaaatacccttttgaaaagcgccttgaagtcgtgaatcactacttcacaactgatgatggttacaggatcatctcggcacgttttggtgtcccccgaacccaggtcaggacatgggttgccctctatgaaaaacatggagaaaaaggtttaattcccaaacctaaaggcgttagtgctgatccagagttgcgtattaaggtcgtgaaagctgtgatcgagcagcacatgtcccttaatcaggctgctgctcactttatgcttgctggtagtggttctgtagccaggtggctgaaggtctatgaagagcgcggagaagctggtttacgcgcgctcaagattggcaccaaaagaaacattgcaatatcagttgatccagaaaaagcggcatcagcattggagctgtcaaaagaccgacgcattgaggatcttgaaaggcaagttcgatttcttgaaacgcggcttatgtatctaaaaaagctgaaagccttagctcatcccacgaaaaagtgaaagtactcaacgagctaaggcagttttatcctcttgatgagcttctcagggctgcggagataccgcgcagtacgttttattatcatctaaaggctctcagcaagcctgacaagtatgcggacgttaaaaagcgtattagtgagatttatcacgagaatagaggccgatacggataccgtagggtaacgctgtctcttcatcgagaagggaaacagattaaccataaagctgttcagcgcctgatgggaaccctctcacttaaagcagcgattaaggtcaagcgataccgctcttacagaggagaggtagggcaaaccgcccctaatgttctccaaagagatttcaaggctacgcggccaaacgagaagtgggttaccgatgttactgaatttgcagtcaatgggcgcaagctgtatttgtctccagtaatagatctcttcaacaacgaagttatttcttacagcctttcggaaagaccagtgatgaacatggttgagaatatgctcgatcaggcattcaaaaagcttaatcctcacgagcatcctgttctgcactctgaccagggatggcagtatcgtatgagaagatatcaaaatatccttaaagaacatggtattaaacaaagcatgtccagaaaaggcaattgtctggataatgctgtggtggagtgtttctttggaaccttaaagtcggagtgtttttatcttgatgagttcagtaatataagcgaactgaaggatgctgttacggaatatattgaatactacaacagcagaagaattagcctgaaattaaaaggtctgactccaattgaatatcggaatcagacctatatgcctcgtgtttaactgtccaactttttggggtcagtacaaggtggtgcttcaggatgggcgtttgttcggtagccccatagacattcttaaccgtgcagctcccgttgcgttactggcgattggcatgacgctggtgatcgccaccggtgggattgatctctccgtaggggcggtgatggctatcgccggagccacaacggctgcgatgacggtcgcgggattcagcctgccgattgttttgttaagcgccctgggcaccggcatcctggcgggattgtggaacggcatactggtagcgatcctcaaaattcagccgtttgtcgccactctgatcctgatggtcgccgggcgcggcgtggcgcaactgatcaccgccgggcagatcgtcacgtttaactcgccggatctctcatggttcggcagtggatcgctgttgttcctgccaacgccggtcattatcgcggtgctgacgcttatcctgttctggctgttgacccgcaaaacggcgctggggatgtttatcgaagccgttggtatcaacattcgggcggcaaaaaatgccggggtaaacacgcgaatcatcgtcatgctcacttatgtgttgagcgggctgtgtgcggcgattgcgggcattatcgtggcggcggatattcgcggtgccgatgccaacaacgctgggttatggctggagctggacgccattctcgcggtggtgattggcggcggatcgctgatgggcgggcgctttaacctgctactttcggtggtgggggcgctgattattcaggggatgaacaccggaattttgctttcgggctttccgccagagatgaaccaggtggtgaaagcggtggtggtgctttgcgtgctgattgttcagtcgcaacgctttatcagtctgattaaaggagtacgtagccgtgataaaacgtaatttgccactgatgatcaccatcggcgtctttgtgttgggttatctttactgcctgacccagtttcccggttttgcttccacaagagtgatctgcaatatcctgaccgataatgcctttcttgggatcattgccgttggcatgacctttgtgatcctctcaggtgggatcgatctctccgtcggttcggtgatcgcctttactggcgtgtttctggcaaaagtgattggcgatttcggcctctcgccgctgctggcgtttccgctagtgctggtgatgggctgtgccttcggcgcatttatggggcttctgatcgacgccctgaagatcccggcatttatcattacgcttgcggggatgttctttttgcgcggcgtcagctatctcgtttcggaagagtcgattccgataaaccatcccatttatgacacgctctcaagccttgcgtggaaaatccctggcggcggtcgcttaagtgcgatgggactgctgatgttggcggtggtggttatcggcatattcctcgcgcatcgtacccgttttggtaatcaggtatacgccattggcggcaacgcaacgtcggcgaatctgatggggatttccactcgcagcaccactattcgcatttatatgctctccaccggactggcaacgctggcggggattgtcttctcgatttatacccaggccggatatgcgctggcgggcgtaggtgtggaactggatgctatcgcctcagtggtaattggcggtacgcttttgagcggtggcgttggaacggtattagggacgctttttggcgtggcgattcagggactgattcagacttacataaactttgatggcacgctgagttcctggtggacgaaaatcgccatcggtattttgttgtttatttttatagcattacagcgtggattaacggtgctgtgggagaatcgtcagagttcgccagtgacaagagtcaacattgcgcagcaataaaaacgcctctccgtgtggagaggcgcaggagattacgcgtccgggaactcacggataaagcgttcgacatcttcaaccatatggtcgttgccgacaaagaatgaacggcgctggtgcagggtttccgggatgatatccagaatacgctctttgccatcgctcgctttaccgcccgcttgttccgccaggaatgccatcgggttgcactcatacagcaaacgcagtttgccgtccgggtggctggcggtgcttgggtagagataaataccgcctttcagcaggttacggtggaaatccgcgaccagtgaaccgatataacgtgaggtataagggcggttggtggatttatcttcttcctggcagaatttaatgtacttcttcaccccgttcggaaacttaatgtagtttccttcgttgatggagtaggttttgcctttctccgggaagcgcatccgttcctggcacaggcagaaaacgccgagcgaaggatcgtaagtaaaggcgtgaacaccgcatccggtggtgtaaaccagcatggtagaggagccgtataccacgtaacctgccgcaacctgtttgttaccaggctggaggaaatcttcttccgttaccggcgtgccaacaggcgtaacgcggcggtagatggagaaaatggtaccgacagagacgttaacatcgatgttggacgagccatccagggggtccatcagcaccacgtattttgcgtgttcacagccttcaaagacgacaatctcatcttcttcttcagaggcaatgcccgcaacgatatcgcgtgctttcagtgcggctttcagtttttcattagcgaacaagtcgagtttctgctgaacctcgccctgcacgttctcagcaccgctggcacccaggatatcaaccagtcctgctttgttgatatcgcgatggataatcttggcgcccagttttattgccgacagcaaagcagtgagctcaccggtagcatgagaaaactcgtgctgcttttcgacaataaattcacctaacgttttcataaaactttccctgcaatgtttatggagtaaagcgaccgcaacaatcttaacaaataatctcaatgttgcgctcaggtgaatcgcgccagcaaattacggattatcctgaaatgcgtttctcacttgcccgacatatgcgtaaaatgagcggcagattaaaaaaggatagtgacgtatgcgcattcatattttaggaatttgtggcacatttatgggcggtctggcgatgctggcgcgccagttaggccatgaagtaacgggttcggacgccaatgtgtatccgccgatgagcaccttacttgagaagcaaggcattgagctgattcaggggtacgatgccagccagctcgagccgcagccggatctggtgattattggcaacgccatgacccgtggaaatccgtgtgtggaagcggtactggaaaaaaatatcccttatatgtcaggtccacagtggctgcacgattttgtgctgcgcgaccgctgggtgctggccgttgccggtacacacggcaaaaccaccaccgcgggaatggcgacctggattctggaacagtgtggttacaaaccgggctttgtaatcggcggtgtgccggggaactttgaggtttcggctcatctgggcgaaagcgacttctttgttatcgaagcggatgagtatgactgcgccttcttcgacaaacgctctaaatttgttcattactgcccgcgtacgctgatcctcaacaaccttgagttcgatcacgccgatatctttgacgacctgaaagcgatccagaaacagttccaccatctggtgcgtatcgttccggggcagggccgtattatctggccggaaaatgacatcaacctgaaacagaccatggcgatgggctgctggagcgagcaggagctggtgggtgagcagggtcactggcaggcgaaaaagctgaccaccgatgcttccgaatgggaagttttgctggatggcgaaaaagtgggcgaagtgaaatggtcgctggtaggcgaacataatatgcacaatggcctgatggcgattgcagcggctcgccatgttggtgtagcgccggcagatgccgctaacgcgctgggttcgtttattaatgctcgtcgccgtctggagttgcgtggtgaagcgaatggcgtcacggtatatgacgattttgcccatcacccgacggcgattctggcaacgctggcggcgctgcgtggcaaagttggtggtacggcgcgcattattgctgtgctggagccgcgctcgaataccatgaaaatggggatctgcaaagacgatctggcaccttcattaggtcgtgccgatgaagtcttcctgctgcaaccggcgcatattccgtggcaggtggcagaagtggcagaagcctgcgttcagcctgcacactggagtggcgatgtggatacgctggcagatatggtggtgaaaaccgctcagcctggcgaccatattctggtgatgagcaacggcggttttggtgggatccatcagaaactgctggatgggctggcgaagaaggcggaagccgcgcagtaattcggccttagccagatatagtatgcgtaggccggataaggcgttcacgccgcatccggcatttgagcatagtgcctgatgcgacgcttgatgcgtcttatcaggcctacaggtgcaccgtatccggcaaaccatactcacatcaacaacgaaaattacccttcgttctccgctaactcgcgcagatactggaaaatctggcgtgcggatttcggcggcttattcccttctttctctttcttcgcgttgcggatcagagtacgcagttgctgacgatcggcatcgggccacagatttaatacctcagcgatggcgtcatcaccttgatcgatcagacgatcgcgcaggttttccagtttatggaacagcaccacctgctggttgtgacggtttttcagcttatccagcgcctgacgaataggctctacgtcgcgctggcgcagcatcttaccgatgagctgcaactggcggcggcgaccttccatcttaatacgctgggcgagctcaatagccgcgcgcagatccgcatctaacgggatcttatccagcgcgtttttccccagatcaacaatttccgcgccaaggcgttttagctcctcggcatcacgtttaatttcacttttactgacccagataatttcatcgtcttcgtcttcgatgtcatcaccgggaacgtcgtcgagccagtcttcgggctgcttagtcatctcaggctccttaaaaaaagaggctaatgttaccagttaagatgcgcactgaaaaacggttctctgttagacttcagagaaactctctacattatggcacttgcaatgaaagtaatctctcaagttgaagcgcagcgcaagattctggaagaagcagtttccactgcgctggagttggcctcaggcaaatcggacggtgcggaagttgccgtcagcaagaccaccggcattagcgtaagcacgcgttatggtgaagtggagaatgttgaattcaatagcgatggcgcgctggggatcactgtttatcaccagaaccgcaaaggtagcgcatcatccaccgatttaagcccgcaggccattgcccgtactgtacaggcggcgctggatattgcccgttatacctcgccagatccctgtgccggcgtggcagacaaagagctgctggcctttgacgcaccagatctcgacttgttccaccctgcggaagtttccccggatgaagccattgaactggcggcccgcgcagaacaggcggcattgcaggcggacaaacgcatcaccaataccgaaggtggcagctttaacagccactacggtgtcaaagtttttggcaacagccacggcatgttgcagggttactgctcaacgcgtcattcgctctccagctgtgtaattgccgaagaaaatggcgatatggagcgtgattacgcctacaccattggtcgtgcgatgagcgatctgcaaacgccagagtgggttggggccgactgtgctcgccgtactttatcgcgtctgtcaccgcgtaaactctccaccatgaaagcgccagtcatttttgccaatgaagtggcaaccgggctttttgggcatctggtgggggcgatagcgggtggatcggtttatcgtaaatctaccttcctgctggattcgctgggtaaacaaattctgccggactggctgaccattgaagagcatccgcatctgctgaaagggctggcgtcgacgccattcgacagcgaaggtgtgcgcaccgagcgtcgcgatattattaaagatggcatcctgactcagtggctgctgaccagctactcggcgcggaaactggggctgaaaagcaccggacatgcgggcggtattcacaactggcggattgccggacaaggtctaagcttcgagcagatgctcaaagagatgggcaccgggctggtggtgacggaattgatgggccagggcgtgagtgccattaccggtgattattcccgtggtgcagcgggcttctgggtagagaatggcgaaattcagtatccggtgagcgaaatcaccatcgcaggtaatttaaaagatatgtggcgcaatattgtcaccgtcggtaacgatattgaaacacgcagtaatatacagtgtggttctgtgctgttgccggagatgaaaatcgccggacagtaaaaaaactggcgcgacctgccgcgctataaactaaaaaattacacaaaatcattcgcactgcatcgagacggaaagtgaatgagggccggggagcgtactcgcagtacgtgacccggtcgaatgagcgtagtcgtcgatgaggcagtgtgaaggatgaagtgtaaataaaaaaggaactattcttgcagtctcctcgttggtattcagttcggcgtcatttgctgctgatctcgaagacaatatggaaaccctcaacgacaatttaaaagtggtcgaaaaagccgataacgcggcgcaagtcaaagacgcgttaacgaagatgcgcgccgcagcgctggatgcgcaaaaagcaacgccgccgaagctcgaagataaatcaccggacagcccggaaatgaaagatttccgccacggtttcgacattctggtcggtcagattgacgacgcgctgaagctggcaaatgaaggtaaagtaaaagaagcgcaggctgctgcagagcaactgaaaacgacccgcaattcatatcacaagaagtatcgttaattcctcatttccctgttgcctgcactcaggtaacagggaacttatcatcgcaaatgatgcaccacctgattgctgctgccgcgccagatcagggaagggtcttttaaatcctgcacaaatttgccgtcgaccagcacgttaatcaaatcaacaacctgcatttgcgcagcgttgagttcgtcgagtttatagcctgtccacacccagatgtctttacccggacactcggcgcggatgcgttgtaccagtttcagaatatccggcacgttttgcggatgcagcggatcgccgccggagagggaaataccctggcgtttgatacgagtgtcattcagatcgttaatgatctggtcttccattgctttggtaaatggctgaccggaatttacccgccatgtgcttttgttatagcaaccggggcattcatgaacacacccggagacaaacagggtgcaacgagtgccggggccgttgacgatgtcgacaggatagtactgatgataattcattatttcgcctggcttatcagtccgcgtgtaggctgcatccggtaatcaatgcctgatgcgacgctgtcgcgtcttatcagacctggagcaattgccaaatgtaggccggataaggcgtttacgccgcatccggcatttgcttagctcagagtgaagattaacctatctgcccattccccaaatgtttaacgcggcgcttaacttcttcctgcttaccagcgttaaacggacgtgcatccgggctacctaaatatccgcacacgcggcgagttaccgacacacgggaggcgtcatggttaccacatttcgggcaagtgaagcctttgctggtgcactcgaactcaccggtaaagccacactcgtagcactcatcaatcggtgtattggtgccgtaatacggtacatgctgatagctgtaatcccagacatcttccagcgccttcaggttgtgctgaatgtttggatactcgccgtagcaaatgaaaccaccgttcgccagcggcgggtaaggcgcttcaaagtcgatcttgtcgtacgggttcaccttcttctccacatcgaggtggaaactgttggtgtagtaacctttatcggtcacgcccggcaccacgccaaactcagcagtatcgagacggcagaagcgatcgcacaggttttcactcggcgtgctgtagagactgaaaccataacccgtttcttctttccactgatccactgcctgacgcagacgttcaacaatggcgatacctttcgcgcgaagctgctcgttgtcgtaaacatgctcgccgccgaacagcgcgttaatggtttcgtggatgccgatgtaacccagcgaaatagacgcacgaccgtttttgaagatttcagaaacatcatcgtcagcattgagacgcacgccacaagcaccttccatatagaggatcggggccacgcgcgctttcacgccttcgagacgagcgatacgggtcatcagcgccttacgtgccagcaccagacgttcatccagcagcttccagaaggtggcttcatcgccttttgcttccagagcaatacgcggcaggttcaggctgatcacgccgaggttgttacgaccatcgtggatctgctcgccgttttcattttcccacacgccgaggaagctgcggcagcccatcggagttttaaacgaaccggtgactttcactacctgatcgtagttcaggatatccggatacatgcgcttgcttgcgcactccagcgccagctgtttgatgtcgtagttcggatcgccttttttatggttcaggccatcgcgaatcgcaaacaccagtttcgggaacaccgcagttttacggtttttaccgaggcctgcgatacggttacgcaggatcgattcctgaatcaggcgcgattcccagctggtgcccaggccaaaaccaaaggttacaaacggcgtctgaccgttggcggtgtgcagggtgtttacttcgtactccagtgactggaaggcatcgtagcactctttgatggttcgagagttagcgtagccttcggcgtccgggatgttccactcttctgcggtcttgcgatgtttgttgtagctggcagtgacaaacggtgccagcacttcatcgatacggttaatggtggtgccgccataaatatggctggcaacctgagcaataatctgcgcagttaccgcggttgccgtagagatcgacttcggcggttcaatctcggcgttccccattttaaagccctgggtcagcatgcctttcaggtcgatcaacatgcagttgaacatcgggaagaacggtgagtaatcgagatcgtgatagtgaatatcgccacgctcatgtgcctgcaccacgtcacgcggcagcaggtgctgacgtgcatagtgtttagccacgatcccggccagcaggtcgcgctgggttggaatcaccttgctgtctttgttggcgttttcgttgagtaacgaggcgttggtctgctcgaccagaccacggatctcctggttcaggcgaccgcgtttttcacgttcaatgtcgcgatcgtgacggtactcgatgtaagcacgagccagttgtttgtatggacctgacatcagctgattttcaactgcggtctggatctcattgatatccacctggttgcggccctgcatctgctcgctgacaaccgcggcaacagtggcgcaataatcggcatcatcgacttccgctgctttagctgcacgcagaatcgcttctttgatgcgctctgatttaaacggcactttgcagccgtctcgtttcatcacatgcggtgtcatgatcgctccatatttttaagaacaggttatccacagaaattgggaaaggcgttttccggttttttcgtttcgttttccggtgctttccgcaatcgccatccgcttatccacaacgccgcacctttttcgtggggagctgtagtagcaattatagtcgattaatacaacatattgggttgggacgcattttaaagtctatatatagtgctttgcatcaaggatgtttgagctttttttgatgtagctcaaagtaaaaagcagagcgtacggatgacgggcgctacagcgatatgtaaattttttaatgaatttgctggttgaaaaatcaacaaaaacaacatactgacagacaaaaccccggaatgaccggcattaccggggcttagggaagatttacttctgtaaccaccagacagcctcaaaaggccgtaaattcatggcacagggttgtggtgaggcttcttcgtagttatgcatcacaagctgccagttgccgcgcatttgccctgcctgccagggttggatctcacggctaaggttggcaatgaccagcaaggtttgccccttccattcacggcgatagcaccacaatacagggctgtttggcagcagatcctggtaattgccccatgtcaggatggcttcctgcttacgcagtgcgattaacttttggtaggtgtaaaacaccgaggaatcatcggccagcgcggcttctacgttgatttgttgatagttatcgcccaggccaatccacggttcgccagccgtaaacccggcattatcgccgttgctccattgcatgggcgtgcgactgttgtcacgggatttactggcgaggattgccaataactcgtcggcatcacgcccatcgttgcgcagctcggcaaacatattgaggctctctacgtcgcgatagtcagtaatgcgcgtgaaatgcgggttggtcatgccaatctcttcgccctggtagatatacggcgttccctgcatgccatgcagcaccatcgccagcatttttgccgcaggcacgcggtattcaccttcatcaccaaagcgagaaacaatgcgcggctgatcgtggttacaccagaacaaggcattccatgctacgttgtgcattccttgttgccagtggcggaacaatgttttcaacgccacaaagtcaggtttagccagcgtccatttttcaccaccgggataatcgaccttcaggtgatgaaaattaaaggtcatcgacaattcactgcctgtcagagccgcgtatcgctggcaatgctcaaggctggtggaggacatttcacctacggtcattaacccgcgtggcgtaaacacatcgcggttcatctcgtgcaaaaactcgtgtgctcgtggcccgtcggtgtagaagcgacgcccgtcgccgtccaggtcttcagggaaacgcgggtctttggagatcagattcaccacatccaggcgcaacccgtcgaccccacgatcggcccagaactcacagacttttttcagctctgcgcgtaccgctggattctcccagttgagatccgcctgttctggtgcaaagagatgcaaatagtactgttcgctttccgcatgccagcgccacgcactaccgccaaattttgaacgccagttgttcggtggcgtttctggttctccatcgcgccagatataaaactggcggtaagggctttctttgttcagcgcctcgcgaaaccaggcatgttgggtagaggtatggttaaacaccatatcgagaatgatacgaatcccgcgcgattttgcctgcgtcaccagttcgtcaaaatcgtccagcgtgccgtaggtgggatcaatcgccgtatagttcgctacgtcgtaaccgttatcgacctggggagagacataaaagggggttagccagatggcatcaacgcccagtttatgcagatagtccaggtgttggataacgccacgtaaatcgccggtaccgctacccgtggtgtcctgaaaactctttggataaatctggtagataacgccgttttgccaccagtggggaagatgagtcattacgttattcctgcgaatgcgagggggcgcaattgcgccccgaagaaaattaaacaatgtccagcgtgcccaggcggtatttccgctgatagataaacgaggtgagtacaatcgggatgatgatggcgatagccattgccagcgcaaacacctgccagtagctcggttgaatcgagagaattcccggcaggccgcctacgccgatgccattcgccataacgccgttcaggccgcatagcaatcctgccagaccagaaccaatcatcgcgcacagcatcgggaagcgatatttcaggttgatgccgtacattgcaggctcagtgaccccaagccaggcggagatagcggcaggcacggagatctcgcgttcattgtgcttgcggctggaaatgataatgcctatcacggcggagccctgagcgatattcgacagcgcaatcagcggccacactggcgtaccacccatgctttgaatcatctgcaaatcaatagcaagcgtggtctggtgtacaccggtgatcaccagcggggcgtacaggaagccaaacaatgctgcgccaatcggagcaaagctgccggtcatcaggtgacgtaccgcaaaggcaacgccatcgccaatcatgcgaccaaacggaccaatcagcgcatgggcgaggaacaccgcgaggatcagcgaacagacgggtaccaccaccagatagaggtaatccggcacgatgcgtttaaggcgagtttcaataacgcccagcgccagtccggctaacagtgccgggatcacctgcgcctgatagcctactttggcgatgctgaacatgccaaagtcccacacttccggcagctgctgcccgagcagataagcgttcatcagctgtggagaaaccagtgtcacgccaagcacgataccaaggatcggcgtgccgcccatttttttcaccgctgaccagcaaataccgaccggcaggtagaagaagatcgcttcaccgatcaaccacagaaaatcgtagatcgtttgcagggaagggtacatttgcgccagcgtctgaccgttgctcatgggcaaatcgccgatcacattgcgaaaaccgaggatcaaaccgccgctaatcaacgcgggcagcaacgggaagaagatcaccgcgaaatgagagatcaactgctcatgccatttcatattatgccgggcggctttttttacctgctctttatcaacctgcgcctgtccggttgacgcaatcagtgcttgatagtaatcacccacgttggtgccaatcaccacctgaaattgcccggcattggtgaaacagcctttcaccatagggagttgctcaatttctttcggtctggcattggccggttggttgaggacaaagcgtaggcgagtaatacagtggctcaccgtcgcaatattgccgcgcccgccgaccagttcaatcaaccgatcgatatccgtttggtttattttgctcatcataaagccccatggcagatgacatttttggttggctgcagaatatattgcgcggaaaaatttaaaaacgggaacgttcccgaaacgcagcgaagatcacaatttatcgttcaggaaacgatcaggacagggtggcggggatgatgatttgttgcggttcgctgcgcccggttacctgcgcgatcaactggcaagccgcctggcgtccagcttcggcgtaaccgggatctacggttacgatctccggatggaggaatttcattaacggcgtattaccgacgctcgccagttgcaaggtgtcgatgcgttgctcttgcaggtatttacttgcgccaagtgccagcgtgtcggttgcgcacagtaaggcggtagtttcaggcgtaatcacttttgcaacgttctcatagccttgcttcatagcaagccctggcagggcggcaacgggatgcagtttatgcgctttgcagaacgccaggtaggcttcgtgacgtcgcttaccggttgtcacgtcactgtgcggcacgccgagataactgatattacgatgcccctggtcatacagccgttgcatcaggattttgattgccccttcgtcgtcataacagaccgaagcaaagccttttgcgtcacgcgccagcagaaccagcgatgactgccagtgggctaacatttcttctgttatgccagtaaaaccgaacagcactacgccgtcgatattacgccgtttcagcactcccaaatgttcggcaactaattgcggggaaaactgactttccatcatgattgggtcgtaaccttgttcatagaacgctggcagcatggtttgaacggcgagattttctgacaacgaatccagacgggtaacaatgatggcgaccactttatcgctttgcccacgcatagcgcgcgcagagcgggaaggggaaaatccatgctgattcatcactgcttcaacacgctcgcgggtgagctggctcacgccgctttcgttattcagcacccgggaaactgtagatttccccacgccgcttaagcgcgcgatatctttgatggtcagccgattttgcatcctgttgtcctgtaacgtgttgtttaattatttgagcctaacgttacccgtgcattcagcaatgggtaaagtctggtttatcgttggtttagttgtcagcaggtattatatcgccatagatgctacgaatattattggattctccttattatttgcggcgcttttttcacttaccggaggttatatggaacctgatcccacgcctctccctcgacggagattaaaacttttccggtaagcccgtcttttcacggcgttaccggatgcgtaaggccgtgacgttttaacgtccctgctcagctttattaccttcaggtaaggcttcgccacgcctgaagacatttctgtactgtttcagacagtgcggagggactccttatgtttaaagaaatttttacccggctcattcgccatttaccttcccgtctggttcatcgtgatccattgcctggcgcgcagcagacagtgaatacggtggtcccgccgtccttaagtgcgcattgcctgaaaatggcggtgatgcccgaagaagaattgtggaaaacgttcgacacccatccggaagggttaaatcaggcggaagtggaatctgcccgcgaacaacatggtgaaaataaattacccgcacaacaaccgtcgccgtggtgggtacatttatgggtctgctatcgcaacccctttaatattttactcaccattctcggcgctatttcttacgccacggaagatttatttgctgcgggcgttatcgcgctaatggtcgctatttctacgttgctgaactttattcaggaagcacgttccactaaagcggcagatgccctgaaagcgatggtcagcaatactgcgacggtgctgcgcgtaattaacgacaaaggcgaaaatggctggctggagatcccgatcgaccagctggtgcccggcgatattataaaactggcggcgggagatatgatcccggcagatttacgtatcttgcaggcgcgggatctgttcgtcgctcaggcgtcgttaaccggtgagtctctgcccgtagaaaaagccgctaccactcgccagccggagcacagcaatccgctggagtgcgacacgctgtgttttatgggcaccaccgtggtgagcggcacggcacaagcaatggtgattgctacaggtgccaatacctggtttggtcaactggcggggcgtgttagtgagcaggaaagcgagccgaatgcctttcagcaagggatcagccgcgtcagtatgctgctgattcgctttatgctggtgatggcaccggtggtgctgttaatcaatggttacaccaaaggcgactggtgggaagcggcgctgtttgcgctttcggtcgcggtaggcctaacgccggaaatgttgccgatgattgttacctcgacgctggcgcgcggcgcagtaaagctgtcgaaacagaaagtgatcgtcaaacatctggatgctattcagaactttggcgcaatggatattctgtgcactgataaaaccggcaccctgacgcaggataaaattgtgctggagaatcataccgatatctccggtaaaaccagcgaacgcgtgctgcatagcgcgtggttgaacagtcattatcagaccggacttaaaaacctgctcgatacagcggtgctcgaaggtacggatgaagagtcagcgcgctcgctggccagtcgttggcaaaaaattgatgagattccgtttgatttcgagcgtcgccggatgtcggtggtagtggcagaaaataccgagcaccatcagctggtttgcaaaggtgcattgcaggaaatcctcaatgtgtgttcgcaggtgcgtcacaatggcgagattgtgccgctcgatgacatcatgctgcgtaagattaagcgggttactgatacgctgaatcgtcaggggctgcgcgtggttgcggtggcgacgaaatacctgccagcgcgtgaaggagattaccagcgggcggatgaatccgacctgatcctcgaaggatatattgcttttcttgatccgccaaaagagacaaccgctccggcactgaaggcattaaaagcgagtggaattaccgtaaaaatccttactggcgacagtgagttagttgcagcgaaagtgtgccatgaagtggggctggacgcgggagaggtggtcattggtagtgatattgaaacgctatctgacgacgaactggcaaatcttgcacagcgtaccacgctgtttgcccgcctgacgccgatgcataaagaacgcattgtgaccttactgaagcgcgaagggcatgtggttggctttatgggcgatggtattaatgatgcgcccgccttacgcgctgcggatatcggcatttctgtggacggcgcggtagatattgcccgtgaagcggctgatatcatcctgctggaaaaaagcctgatggtgctggaagagggggttattgagggacgtcgcactttcgccaacatgctgaaatacatcaaaatgacggcgagctctaacttcggtaatgtgttcagcgtgctggtagcgagtgctttcttgcccttcctgccgatgttgccgttacacttgcttattcagaacctgctgtacgatgtgtcacaggtggcgatcccgtttgataacgtcgacgacgagcaaattcaaaagccgcagcgttggaatccggcggatctggggcgctttatgatcttcttcggaccgatcagctcgatcttcgatattttgacgttttgcctgatgtggtgggtattccatgccaacacgccggaaacgcaaacgctgttccagtcgggatggtttgtggtgggcttactgtcgcaaacgctgattgtgcatatgatccgcacccgccgtgtgccgtttattcagagctgtgcatcgtggccgttaatgatcatgaccgtgatcgtgatgattgtcgggatcgcattgccgttttcaccgctggccagttatctgcaattacaggcgctgccgttaagctatttcccgtggctggttgcgattctggcagggtatatgacattaacccagttggtgaaagggttctatagccgtcgttacggctggcaataaagaataaactgggcacgatagccccgattcagattgtagacaaagtgagttttgttcatgccggatgcggcgtaaatgccttatccggccaacaaattcaataaattgcaggaatcacgtaggcctgataagcgtagcgcatcaggcgattttgcgtttgtcatcagacttaatccgggcatgatagcccggatttccatcaagattagcgacgaacagcgatcgcttcgatctcaatcttcacgtctttcggcagacgggcaacttcaacgcaagaacgtgccgggaaggtggcgttgtgttcggtgaagaaggcttcgtaagtggcgtttacggttgcgaagtcgttcagatcttttacaaacacggtagttttaacgatgtcgcccactttcaggccagcggcttcgacgatcgcttttacgttatccagcgactgacgtgcctgtgcagcgacgtctgccggtacttcgcccgttttcggatttaccgggatctgaccggaggtgatgatcatattgcccagatcaacgccctgtacgtaaggaccgatagctgccggtgcattttccgtcgcgatagttttgctcatgatttctcctttattacagcggtaaaaagtctggctcattatagggagccagacttttattaccaaccgcaattaattggccagcaccacattatgggaaaactctttttcacagtatttgcatttgagcgcgatatcattggcgcgttttcgcacggcaaagctggatgaaaccggttcggcatggctgatacagttgctgttcgggcagaccagcacattgtcgatgcgctccggcagacttgggcgcgatttacccaccacttcatagttgtcgatacggttaaccgtggcttgcggcgcatacaatgccagttgatctacttgatcttcactcaaaaaggtattttcgattttgatcagatctttgcggcccatctcgccagaaggcaggttcagaccaatggtgatgcgctgatccgtttcggtcagcttgaacagactcaacagcttaaaaccgatctgggcggggatatggtcaattaccgtgccgcgtttaatagcttcaacctgcaatttattatcgtgtgtcatctctatttccccttacagtaccagatcgcgattcagaaccagtgccagtaacgcctggcgagcgaaaatcccgttgcctgcctgctggaagtaccaggcgtgtggcgttttatcaacatccgtcgcaatctcatcaacacgcggcagcggatgcagcactttcatattggctttggcgttgtggagatcgctggcgcgaagaacaaactgcgctttcacgttggcgtactcggacgggtccagacgctctttttgcacgcgggtcatgtacaggatgtctacttccgccatcacttcttcaatagagctgtgcagactccatgcgatccctttttcatcgagcatatccagaatgtattgcggcattgccagcgcgtccggcgcgatgaagtaaaaacggttgccgtcgaacttcgctaacgcctgagtcagggagtgaacggtgcggccatatttcaggtcaccaaccattgcgacgtggagattgtccagacgcccctgggtttcctgaatagtgaataagtccagcaaggtttgcgtcggatgttggttggagccatcaccggcattcagtaccggtacattgccggaaaactcggtggccaggcgcgccgcaccttcctgcggatgacgcatcactatcgcatcgacgtaagtgctgataaccgaaatggtatcggccagcgtttcgccctttttacccagtgatgtattggcgctgtcggagaagcccaccacgctggcccccaggcggtgcatagatgtttcgaaagagaggcgggtacgggtagaggcttcgaagaaacagctggcaatgactttgtgcttcaacagctctggttgcgggtttgctttcagtttcgccgctgtcgccagcaccagattaaggtcatcgcgactaaggtcgtttatggaaatgatatgtttctgatatagcggattagccatcttttatctcctgacgcctgggcaaaaaaaagcccctcgattgaggggctgggaatgggtgatcaacgggaagaaaaacggcaggccagcgtcttttttcagacgcggtaagacaaaatgtcgaacacactgaaccatacatcctcccggcaaattgtccggcattatactcatcgtcagaagcggcgcaagcatttgatgcaatattttgtcagcgcaaacggtttatttgaattaaaagtcaaggtatatgcatttttatttgatgtgattctgcaggggaactgtccttcggtatcaataattgcagacattccctgctttttcctttttcactttcacgcaatcagatatgcattttattccattcatccgacttatagggcggagtgtgaaagcgaacggctaacactattgcttactgctcagggatgcgcgctatcactttaatttcaaaatcaaagcctgccagccatgtaacacccaccgccgtccagtttggataaggtggggcgctaaatatttcatttttcaccgtcatgatgtcttcaaattggttttctggatcggtatggaagctcgtaacatcaatgatatcgtcaaaagtgcatcccgcagctgccagggtcgcatgcaaattatcaaatgccagtctgacttgttgctgaaaatcgggttctggtgttccgtcctctcgacttcctacttgcccggaaacaaacagcaaatcgccggaacgaatagccgcagaataacgatgctcagcatatagtgaatgtcggccagcagggaaaacagcggttctttctaccatttggttatcctcaagatttacgacatgaacagaagatttctctttaccgggagccgcttttagcggacgacgtgagtaaacaaaacccagacatcatggataatggctgggcttaattgagcgtagtcggttatgcgccaaacgcgccatcaatggtatgcatcgcgccggtaacaaaactggcttctggccctgctaaccatgcgaccataccagcgacctcttccggttgcccatgtcttttgatagccatcaaactatgcaacatatcgcgcattggcccgttggcgggattagcgtcggtatcaattggccctggctggacgacgttaatggtgatcccacgcggtccaaaatcacgggccagcccgcgcgccatgccttgcagggcagatttgctggcggcataagcagccatgcctgcaacaggcatacgatcgccattcacggagccgatgattaagatgcgcccgccttcgggcatctgccgggcggcttcaacagaggcatgataaggagcatgaatattgattttgaaaaggcgatcaatatcgtcggcatttaattccagggcctcgccaaagacgccaatacctgcatttaccaccaggatatccaatgcgccgctcttacgaacgacatcaatgacagcgtctctgtcagcactatctgtgaatactgctgtcgctccagtctcttgtgccaggcgtttagcggcatctttcgaccccgcataggtgaatcgtacattggccccatcggtgacgaaacgacgtacgatagcggcaccgataccacgactgccaccgaggatgagaactgtcttacctgtaaaagcgcccataaggactccttgatttattatgtaacatgcattacaaaactgttttaactttctgtcaacaggttttgtaatggtcactaaaaaacaatctcgcgttccaggtcgtcccagacgtttcgctcctgagcaggcaatctctgcggcaaaagtgctttttcaccaaaaaggtttcgatgctgtcagtgttgctgaagttactgattatcttggtattaaccccccgagcctctacgcggcttttggcagtaaagctgggttatttagccgtgtactcaatgaatacgtcggtacggaagctattccgcttgccgatattcttcgtgatgatcgtccggtaggcgagtgcctggttgaggtattaaaagaagcggcgcgcagatatagccaaaacggcggctgcgctggctgtatggttcttgaaggtattcatagtcatgatccacaagcgcgtgatattgccgttcaatattatcacgccgcagaaacgaccatttatgactacatcgccaggcggcatccacaacgcgcacaatgtgtgactgattttatgagtaccgtgatgtctgggctttctgcgaaggcacgagaggggcactctatagaacaactctgtgcaacagctgcaatggcgggggaagcgataaaaactattcttgaggagtgatgcgggccttgacccgaaaggcgggaaagcgcctgccgataagttgtgataagacaataattcacgcgttaaggctagcggaattgattatcttttcgtataacgatagaaatgaaacgttgttttaattaaggagtggaaaagatgatcatcggaaatattcataatcttcagccgtggctaccccaggagttacgccaggcgattgagcatatcaaagcacacgttacggcagaaacgccaaagggcaagcacgatatcgaaggcaatcgactgttttatcttatctcggaagatatgaccgagccgtacgaagctcgccgtgcggagtaccatgcccgctatcttgacattcagattgtgttaaaaggtcaggaaggcatgaccttcagcacgcaacctgcaggcgcgccggataccgactggttagctgataaagacatcgcatttttgccggaaggcgttgatgagaaaacagttattctaaatgaaggtgattttgttgtgttttatccgggggaagtgcataaaccgctgtgcgcagtgggcgcgccagcccaggttcgcaaagcagtagtgaagatgctgatggcgtgatgacttttcgccgtaaataactcaaggtttacggcgagtttgtgaaaagagcgttttttgatatttttttgtgagtaaaatttgtaatgcttagacgttcttattcactcaaggagttcgtcatgagcaaaatatcagatttaaattattctcaacacattacattagccgacaattttaaacaaaaaagtgaagttttaaatacctggcgtgttggaatgaatgattttgcccgtattgccggggggcaggataacagaaggaatattctttctcctggagcatttttagagtttttggcaaagatatttaccctgggttatgtggattttagcaaacgctccaacgaagcgggtagaaatatgatggctcatattaagtcctcatcttattctaaagatactaatggcaatgaaaaaatgaagttttacatgaataatcctgtaggggaacgagcggattcacccaaggtgattatagaaatttcactttccactatcactactatggggactcgtcaaggacatacagccattatatttccacaacctgatggttcgactaaccgttatgaagggaagtcctttgaaagaaaagatgagagttcattacacctgattactaacaaggttctggcgtgttaccaaagtgaagctaacaagaaaatagcgcgtctattaaataataatcaggagttaaataatctacagaaattaaataatctacagaagttaaataatctactgaagttaaataatatacaggggttaaataatcctcaggagttaaataatccgcagaatttaaatgattctcaggagttaaataactcgcaggaattaaatagtccacaggagttaaatgatccgcaggagttaaataattctcaggacttaaataactctaaggtgagttgtacagtttcagttgattctacgattacgggtttattaaaagaaccattgaataatgcattattagcaataaggaacgaacatctgctattaatgcctcatgtatgtgatgaatcgatttcatacttactgggcgaaaaaggtatacttgaagaaatagataagctctacgcattaaatgatcacggaattgataatgacaaagtaggtaacaatgaaattaatgacatcaaagttaacctgtctcatattcttattgattccttagatgatgcaaaggttaaccttacaccggtcatcgattcgattctggagactttttcaaaatccccatatattaatgatgtaagaatactggattggtgttttaataaaagcatgcaatattttgatgatactaaaaagataaagcatgcatgctccgtaataaatcatattaatcttcgcagcgatcagtctaaaatagctgagacattatttttcaatctcgataaagaaccctataaaaatagccctgaattacaggggttgatttggaataagttggttgtatatgtcaatgaatttaacttaagtaatcgagaaaaaacaaatttaatacaaaggctatttgataatgttgagtctatatttaatgaagtacctgtcagcattttagtgaatgatatttttatgaatgatttctttatgaaaaatcctgagatgattaattggtacttccctcagttacttaagagttatgagggtgaaaagatttattttgataatttaaaatatgatttaaatgataatgataaggaatctaataaagaaattttgaagaatcaaccagataatgttatcaaagaaaaactgaataatgaatacaaacttagatttagaatgatgcaaactatcttgcaatcgagagttaatgtattaccatatattaatgaacagcgtttaaataaactaaatccaccggaaaatttacgtatagcaatagaacactttgggtggaagaatagacctatcactgcataaaataatgtgatgccgggatggtttgtatttcccggcatctttatagcgatagcaattatttactgagcgtcgcgaccatcaccgctttgatagtatgcatacggttttccgcctgatcaaaaacaatgctggcggcagattcgaagacctcatcagtgacttccataccgccatgtaggccaaattcttccgccattttcttgccaagcgtcgtttggtcgtcatgaaacgcgggcaggcagtggaggaatttgacctccgggttaccggtcaactgcatcatcttgctgttcacctgatattcacgcagcaatgcaatccgttccgcccatttctcttttgcttcccccatcgacacccacacatcggtatagataaagtcagcaccttcaactcccttcgcgacatcttcagtcagcgtaatattcccaccattttgctgtgccagggcgcggcattccgtaaccagcgcagcttccggccagcacgcttgtggcgcgaccagacgcaaatccagaccggtaagcgccgcagcttcgagcatcgaattgcccatgttgttacgcgcgtcacctgcatagaccagcgtcatttcgttgaacgctttgccgggcaaatgctcctgcatggtgagaagatccgccagcagctgcgtgggatggaactcattggtcaggccattccataccggcacgctagcgtattccgccagtgtttcgacaatctcctgaccatagccgcgatactgaataccgtcatacatgcgaccaagcacgcgggcagtgtctttaatcgactctttatgaccaatctggctgccgcttgggccgagataagtaacgcgagcaccctggtcatatgcggcaacttcgaaagagcatcgggtacgagtcgagtctttttcgaagatgagcgcgatgtttttaccagtgagtttggcttcttctttaccgcttttcttatcggctttcagcttcgcggctaactgcagcaggctgttgagttcagctggcgtgaaatcgagtaatttcaggaaatgcttatgataaaacccggacatagatccctcctgtggctaacgcctcaatgaattaaaattcaatttatatggatgattattcatttgcaagtctaaagcataaatctttgtcacaaaggtggaggcaatgtcagtggtgtgtgacaataagagtatcggcaggacattaagaggaatgagccatggcaaacccggaacaactggaagaacagcgtgaagaaacacgtttgattattgaagaattactggaagatggcagcgatccggacgcgctgtacaccatcgaacaccatctttccgcagacgatctggaaaccctggaaaaagcagcagttgaagcgtttaaactcggttacgaagtgaccgatccagaagagctggaagttgaagatggtgatatcgtgatttgctgcgacatcctcagcgagtgcgcgttgaatgccgatctgatcgatgcccaggttgaacaactgatgacgctggcagagaaatttgacgttgagtacgacggatggggcacttactttgaagatcctaacggcgaagatggcgacgatgaagattttgtcgatgaagacgatgacggagttcgccactaattaagcgtagcgcatcaggcccaggtagttcctgcaacctggtgaatttgtagcccggataaggcattcatgtcacatccggcataaacaaaacgtacgttgttaatgttcgaatgcccgcgagttgaacacgcgggcatttttttagagttcgcgcaacatccgcacttcacaatcgacatggcccgtgcagccaagcgcatagtcgatatgctcaaagcccaaatgctcataaagcgcaatggcttcctttaaaaaagcggtcgtttccagatagcagcgtttgaaacccatctctcgcgcctgctccatcgccattaaggccagtttttttgccagccctttgccgcggatagccggaagaaaatacatcttttgcagttcgcaaatatccgactcactcccggttaatggcgctatcccaccgccgccgaccacttcaccctcgtactcaacgacccaatatgcatggccaggctgactatatacttgatacagctcgtcaagattcggatcggcgacggtgtagcctttatcagcggtaagaccgtattcggcggatacctgacgaatgacgcgggcgatagcaggattatcctgcagcgtcaggcgacgcattacaggtgattgcggcgcaatgttattcatagtttaacccaataaaaataaagtaattatacatttgtttaataccactctcttcttacgtacgcaagcgacttataaagtaataaagtttttgccagcctattactgataagagtattgtaacgtggcagaacattttactgtctgtatatataagttatatcaatggattttttaattcagggaatttttatggctcaagttattaatgaaatggatgttccgtcccattcgtttgtttttcatggtacaggtgagagatattttcttatttgtgtggtgaatgtgttgttaacgattataacgctaggtatctatttaccatgggcattaatgaaatgtaagcgttatctttatgctaatatggaagttaacggacaacgattttcttatggaattaccggtgggaatgtttttgttagttgtcttttttttgtttttttctatttcgcaatcttaatgacagtgtcagcagatatgccgcttgttggttgtgttttgactttgttactgttggttttgcttatatttatggcagcaaaaggactgcgtcatcaggccttaatgaccagtctcaacggcgtaagatttagttttaattgctctatgaaagggttctggtgggtgacctttttcttgccgattttaatggccattgggatggggactgttttctttatctcgacaaagatgctacctgccaatagttcaagtagtgttattatatccatggttctgatggcaatagttggtattgtttccattggtatttttaatggtactttatatagtctggtaatgagttttctctggagtaataccagtttcggtatacatcgtttcaaggtgaaattagatactacgtattgtataaaatatgccattctcgcatttttagctttattgccttttctcgctgttgctggttatattatcttcgatcaaatattaaatgcgtatgatagttctgtatatgcaaatgatgacattgagaatttacagcaatttatggaaatgcaacgtaaaatgataatcgcgcagttaatctattattttgggattgctgttagcacaagttatttaacggtgtctttgcgaaaccattttatgagcaacctgtcactgaatgatgggcgtattcgttttcgcttaactttaacgtaccacggtatgctttatcgcatgtgtgcgttggtggtgatatccgggattacgggcggtctggcttatccactgctgaaaatatggatgattgactggcaggcaaaaaatacgtatttgctgggcgatttggatgaccttcctttaatcaataaagaagaacaaccagataaaggcttcttagccagtatttcacggggagttatgccttctttaccatttctgtaagagataaaaaaggccggagcatgctccggccttcgttttcatcactgtgttttgattacagcgcggcgataacagcctgctgttcaatcagtttcgctttcgcttccgcatagccttccagcttctcacgctctttcgcgatgaccgcttccggtgcgcgggcgacaaagccttcgttcgccagtttgttctcgatacggctgatttcaccttcaatcttcgccacttctttcgccagacgcgccagctcatcttctttgttgatgaggccagccatcgggatcagcagctctgcaccgtcgatgatcttcgtaacggaaaccggacctttgtcatcggcaggcagcacggtgatactttccagacgcgccagggtttgcaggaagccacggttttcatttacgcgacgttctgcatccgcgctgcaaccacgcagcagcagctccagcggtttgcccggcgcgatgttcatttctgcacggatgttacgtaccgcaacgatcgcctgtttcagccattcggtgtcggccagtgcggcttcatcaacctgagatgcatcgtactgcgggaacggctgcagcatgatggtgtcggcagtgataccgcaaagtactttcacacgctgccagatggtttcggtgatgaacggaatgatcggatgcgcgaggcgcagcagaccttccagtacagtcaccagcgtatggcgagtaccgcgcagttctgcttcggtgccaccgttcattaccggcttggtcagctcgagataccagtcacagaactggttccaggtgaactcatacagaatgcctgcggcgatatcgaagcggaagctgtccagcgcttcgcggtacgctttgatggtctggttgaactccgccagaatccagcggtccgccagcgacagcgtcatttcgccgccgttgaagccgcaatcctgaccttctgtgttcatcagcacaaagcggctggcgttccacagcttgttacagaagttacggtaaccttccagacgcttcatatcccagttgatgtcacgaccggtagacgccagcgccgccagggtgaagcgcagcgcgtcagtaccgtgcggctcaataccgttcgggaactgcttctcggtgcgcttacggattttgtccgccagctgcggctgcatcatattgccggtacgtttttccagcagttctggcagcgaaataccgtcaaccatatccagtgggtcgataacgttacccttggatttggacatcttctggccttcgtcatcacgaatcaggccggtcatgtaaacggtgtggaacggcacctgcggtttgccattttcatctttgatgaagtgcatggtcatcatgatcatgcgggcaatccagaagaaaatgatgtcgaaaccagataccatcacgctggttgggtggaactgacgcagggcgtcggtattttccggccagccaagggtagagaaggtccacagcgcagaagagaaccaggtatcgagaacgtcttcgtcctgacgcaggacaacatcagcaccgaggttattttctttacgcacttcgtcttcgttgcggccaacataaacgttacccgcttcgtcataccatgccgggatacggtgaccccaccacaactgacgagagatacaccagtcctgaatatcgcgcatccaggagaagtacatgttttcgtactgcttcggtacgaactgaatgtcgccgttctcaaccgcttcaaccgccggtttcgccaggacatcggcacgcacgtaccactggtcggtcagcattggttcgataactacgccgccacggtcgccgtaaggaacggtcaggtcgtgcggtttaatttcttccagcaggccaagcgcgtcaactgcggcaacgactgctttacgtgcagcaaaacgctccagtttctggaactctgcagggatttcgctggaataaacgtcagattcgttacctttggtatcgaacacctgggcgctttcacggatatcgccgtcaaaggtcaggatgttgatcatcggcagggcgtgacgtttacccacttcatagtcgttaaagtcgtgcgccggagtgattttcacgcagccggtgcctttttccatgtcggcgtgttcgtcgccaacgatcggaatacgacggttaaccagcggcagaatgacatatttgccaatcagatctttgtaacgcggatcttccgggttaacggctacgccagtatcgcccagcagggtttctggacgggtagtcgcgaccaccagataatctttaccgtctgcggttttcgcaccgtcagccagcggatagcggatgtgccacatcgaacctttcgattcgcggttttcgacttccaggtcagagatagcggtgcgcagtttcggatcccagtttaccaggcgtttgccacggtaaatcaggtcttctttatacagacgaacgaaaacttctttcaccgcattggacaggccttcgtccatggtgaagcgttcacgctcccagtcgacggagttgccgagacggcgcatctgacgggtaatggtgccgccagattccgctttccattcccagattttgtcgatgaaagcttcgcggccgtagtcgtgacgggttttaccttcttctgcggcaatcttgcgctcaacgaccatctgggtagcgatcccggcgtggtcagtaccgacctgccacagggtgtttttgccctgcatgcgctgatagcggatcatggtatccatgatggtttgctggaaggcgtgacccatatgcaaactgccggtgacgttcggcggcgggatcatgatgcagaaactttcctggctttcatcgccattaggcttaaagtagccctgcttttcccagtgctcgtaaagcggctgttcgatatcttgtgggttatatgtcttttccattatttccaggttgccgtattcaggttgaaaccagccacgcggtaggctttatagcgttcgcgcgccagttgtttcagagaatcttcataaggaacgaagtctaccacttctgtgaaagcggtggcaaaatctgcaaagcttgttcgcagactaatcaatatatcgcgccggctgctgctacgcttttgcggccaggcgatctccaccggtgcaccgccgcgcggtccttctcccgctaaattatgcggaacaaagctttctgccggacgcgcccacagggcttcatccagccggtaagcctgcttttcatcttcacaggcgatgagcacgcgcttaccgctgcgccaacgttctgcggcaatttcacacaccagttgctcaacggcgcttaagccatcgacggtggtgtcattgtccagaaggtagaacgtcgcgtttttcataaatggggcttcttgtggtggatttaaatacgcatcaggtatacaccgcagcgcctgatgcgacgctgttgtgtcttatcaggcctacgagttcagtgctgtgtaggtcggataaggcgttcacgccgcatccggcaataacagccttgcctgacgcaattactcttcgccgttaaacccagcgcggtttaacaggaactgtgccagcaacgctaccggacgaccggtggcgccttttgctttaccagaacgccaggcggtaccggcgatatccaggtgcgcccagttgtacttacgggtaaagcgtgacaggaagcaacctgcggtaatcgccccaccaggacgaccgccaatgttcgccatatcggcaaaattggactccagttgttcctgatactcgtcacccagcggtaagcgccatgcgcggtcaccggattgttcagacgcggcaatcagttcatgggccagcggattatggttcgccatcagaccagtaatatgatgacccagcgcgatcacgcaggcaccggtcagcgtcgccacgtcaatcaccgcttccggctcaaaacgctcaacgtaagttaacacgtcgcacagtaccaggcggccttcagcgtcggtgttcagcacttcaacggtttgaccggacatggtggttaacacatcgcccggacgataggctcgtccgccaggcatgttttcgcagcctgccaacacgccgataacgttaatcggcagttgtagctccgcgaccatccgcatcacgccgtaaaccgctgccgcaccgcacatatcgtacttcatctcatccatgccttctgaaggcttgatcgagataccgccggagtcgaaggttaaacctttacccaccagcacgattgggcgtgcatcttccgacgcgttgcctttgtactcaatcaccgacatcagcgattcgttttgcgaaccctgaccgaccgccagataggaatgcatccccagctctttcatctgctgttcgccgataacgcgggtgatgacattcttgctgtagctgtcagccagctggcgcgcttgtgaagcgaggtaagcggcgttacagatattcggcggcatattgccgagatcttttgctgctttaatcccggcggcaatcgccagaccgtgctggatcgcgcgctcaccgctggtcagttcacggcgggtcggcacgttgaacaccatcttacgcagcggacgacgcggttcgctcttgttcgttttcagctgatcgaaactgtagagcgtctcttttgccgtctcgacagcctgacgcactttccagtagttgttacggcctttaacgtgcagctcagtcagaaagcagaccgcttccattgagccagtatcattcagcgtattaatggttttctgaataacctgcttgtactgacgctcatccagctcacgttctttgccgcaaccaataaggagaattcgctcggaaagtacattcggaacatggtgcagcaacaatgtctgccccggttttccttccagttcgccccgacgtagcagggcgctgatgtacccatcgctgattttatcgagctgttctgcaatcggagaaaggcgacgtggttcgaagacgcccacgacgatgcaggcactccgctgtttctccgggctaccgctttttacactaaactccatgcactacgctcctgaatcttaaagacaacggcggtggctacagatagaattgcaagctttcgtaactcatgtccgctgttgcgatgacttcgtgttaatcttaacgttattacggcattggcacgtcagaacaaaatctgagaggtgaatccgttgagtataattatcttagcgacgatttcgacgactcaagagaataaatgacgtttaagccatgaaacaagctaaaatcctgcaaaagacgagtttttacgggcgtatttaaagtgataatcataagatatctggtgcgggagacgctcaaaagccagctggcgatactcttcatcttgcttttgatcttcttctgtcaaaagttagtgaggatcctcggcgcagcggttgacggcgatattccggcgaatctggtgctctcccttctcgggttgggcgtgccggaaatggcgcagcttatcctgccattaagcctgttcctcgggctgctgatgacgctgggcaaactgtataccgaaagtgaaattacggtaatgcatgcctgcggcctgagcaaagcggttctggtgaaagcggcaatgatccttgcggtattcacggcaatcgtagcggcggttaacgtgatgtgggcgggaccgtggtcatcgcgtcatcaggatgaagtgttagcagaagcgaaagcgaaccctggcatggcggcgctggcgcaagggcaattccagcaagcgactaatggcagctcggtgctgttcatcgaaagcgttgacggcagcgatttcaaagatgtgttcctcgcgcaaattcgaccaaaaggtaatgcacgtccttctgtggtggtggccgattccggacatttaacccagctgcgcgacggctcccaggtcgtcactctcaaccagggaacgcgcttcgaaggcactgcattgttacgtgatttccgcattacggacttccaggattatcaggcgatcattggtcaccaggcggtggcgctcgacccgaacgataccgaccagatggacatgcgcacattgtggaacactgacaccgatcgtgctcgcgcagaactgaactggcgtatcacgttggtattcaccgtgtttatgatggcacttatggtcgtaccgctgagcgtggttaacccacgtcagggacgcgtactgtcgatgctgccagccatgctgctgtatctacttttcttcctgatccagacctccctgaaatcgaacggcggtaaaggtaagctggacccgacgctgtggatgtggaccgttaacctgatttatctggctttagcgattgttctcaacctttgggacaccgtgccggtccgccgcctgcgcgccagtttttcgcgtaaaggagcggtgtgatgcaaccttttggcgtacttgaccgctatatcggtaaaactattttcaccaccatcatgatgacactgttcatgctggtgtcgctgtcgggcattatcaagtttgtcgatcagctgaaaaaagccgggcaggggagttacgacgcgttaggcgcaggaatgtataccttgctgagcgtgccgaaagatgtgcagatcttcttcccgatggcggctctgcttggggcgttgcttggtcttgggatgctggcgcagcgcagcgaactggtggtgatgcaggcttctggttttacccgtatgcaggtggcgctgtcggtgatgaaaaccgccattccgctggtcttgctgacgatggcgattggcgaatgggtcgcgccgcagggcgagcagatggcgcgtaactaccgtgcgcaggcgatgtacggcggctcgttgctctctacccagcaaggcttatgggcgaaagatggcaacaacttcgtctacattgagcgggttaaaggtgacgaagagttaggtggcatcagcatttatgcctttaacgagaatcgtcgtctgcaatccgtacgctatgccgctactgcgaagtttgacccggaacataaagtctggcgtctgtcgcaggttgatgaatctgatctgaccaatccgaaacagattaccggttcgcagacggtgagcggcacctggaaaaccaacctcacgccggacaaactgggcgtggtggcgctggacccggatgcactctctatcagcggtttgcacaactatgtgaagtatctgaagtcgagcggtcaggatgccggacgttatcagctcaacatgtggagcaaaatcttccagccgctatctgtggcggtgatgatgctgatggcgctgtcgttcatctttggcccactgcgtagcgtaccgatgggcgtgcgtgtggtcaccggtatcagtttcggttttgtcttctacgtactggaccagatcttcggcccgctgacgttggtttatggcatcccgccgatcatcggcgcactgttgccaagcgccagcttcttcttaatcagcctgtggctgttaatgagaaaatcgtaaccgaatgaacgaataaagggagcgaaagctccctttattattgttagcaaagtgtgcttcgttcattcctgaaaaataattaaaattcaatatattgcagtggggtgggcatgataagacgcgccagcgtcgcatcaggcaaagacaaatctcgcctgacttaccttcttctcccccccagcaaactccccaacatcccgcgtacaatctgattcgtcacttggcgagcggcgcttttggccattgtttgcaccacaccatctttcttcccgccgcgtggtccggtagtgccgaacaaaatatccttcaatccaccaagaatgccgtcatccaccgctacctctttccctttcgcgggaggattattttgctgctcggtactggcctgaaagcctttttgcaacatctcataggcggattcccggtccacctcatcctcatatttgccatacaccggagagtgattaatcaagccattacgctcatcttccgtcaccggccccatccgcgaacaaggcgcgatcaccatcgcacgctccaccacagaagggcttcctttcgcatccagaaaagagatcaacgcctcgccggtgcccagttcctgaatcgccttttcggtatcaaacgccggattggcccgcatggtttgcgccgctgccttcactgctttctgatcttttggcgtaaaagcccgcaaagcatgttgaacgcgattaccgagctgcccgagcacattatccggaatatcagacgggttttgcgaaacgaaccagacgcccacgccttttgagcgaataagccttatcacctgctcaatcttatccagcagtacctgcggggcatcgttaaacagcagatgtgcctcgtcgaagaaaaacaccagttttggtttctccagatcgcccgcttccggcaattgttcatacaactctgaaagcatccacagcaggctggcggcgtacagtttcggcatctgataaagtttctcggcgctgaggatattgataacgcctttaccgttggcatcggtgcgcatccagtctttgatatccagcatcggctcaccaaagaagtgtgctgcgccttgctgttccagcgacaacagcccgcgctggatggcaccaaccgatgcgctactgatattaccgtactgattctggaaggatttggcgttatcgccgatgtactgggtaattgcccgcagatctttaaagtcgagcagtaacagcccctgatcgtcagcaatgcggaagatgatattcagcacgccagattgcacatcgttgagattcaacagtcgtgccagcaacagcggccccagatccgaaaccgtcgcccgcaccggatggcctttctcgccaaagatatcccacaccaccaccggattggcatgcggttgccagtcattgacgccgatatttttaagccttgcgagcagtttttccgacaccgttcctgcctgcgcgacgccggtcagatcgcctttcacatcagccataaacaccggcacgccgatttccgacaatgactccgccagtttttgcagcgtaacggttttacccgtccccgttgcgccggtaatcagcccatgacggttagccattcccggcagtaaaaacagttctgtgtccggcgtgcgggcaattaacaggggttcactcatgagatatcctccagtttcctgcctggagtataggcaacgtccggcaaagagaatacgtgtaatgaagagaaaataacctaaagcgtgttgccgtgataaatctgatacccgaggtcaacagtgttgtggttgtgatcgttatttttaattttgctcagcaacatttgggcggccatccgaccaatatcaaaacggggagtaattacgctggcgaggcttgggatcatttgcctgccaatctccagcccatgaaaacccgcaatggaaatttgttctggcacggcgaggtttcgctcgcggcacagcagaagcgcacccatcgcaatatcgtcattggtgcaaaatacaccgtctaaatccgggtttgcgctaagggcatcacgcattaactgcattcctaaatgaatggatgagatggcgcgtggattcatgcgtaatggggaaagattatgcagcatcatcgcatcgcaatacccctgataacgctgttcatcgcgggtgtcatctttggaaccgagatacagaattttgtgcctgactcgcttctccagcatggtacacaccatgtcaaaagcggcctgccgattatcaaaaccgacctccatatccagccgttctccctgtacatccatcaattccacgaccggaatggtggctgaacgcagaaatttcaccgtcctgatggtgtgatatttttccgaaagtataatcccgtcaatgttataagagagcaggttaatcaccgactcttcttcggaatcgcgatcgtaattgtaattagcaataagggtctgataattatgctcagaggtgacggattctattcccgcgagaatgtcagcgaagagttgattttgaaatgacggaatcaagataccgagggtataactttgtgcattcaacaacatgccgggagcgcgattagggatataattgatctcttccataattttggcgatgcgctcgcctgtttcctttgccacctttttcggcgagcggatataacgactcacggtcatttttgttacgccagccagcgtagcgatatcctgtaaagaaattctgtgattgcgcataacttctcccaacgtcgggggaatcttcaatcttcccccgaaactacatcacaatattttattctttcagtgcaatacggcgttaatggctaacacgcccagcaaacccataatagaaataagggtttccatcaccgtccaggtacgcaacgtttcaccaaccgtcagattaaaataccctttaaatagccagaagccagggtcgtttacgtgtgacgcgatcacgctgcccgcaccggttgccagtaccattaaagcgggatcggcatgggtaacgttgataatcggcaacaccacacccgcggtggtaatggccgcgacggtggcagagcccagagcgatacgcaacagcgccgcaacagtccagcacatcaataacggcgaaagtgtagttccggtcattaagtgtgaaatatagtgcccgacaccgctatctactaatacctgcttaaacgcgccgccgccagcgataataaacacaatcatcgcgatagcgcctatagaatccccaatgatatccatgatttgctcgatggtgcgtccattacgtcggcccagtgtgaaaatcgcaataacaatggcaataaacagcgcaacggcagggttaccgacaaattcaaagaagaggcgcacggtgttagttttcggtaacgtaatttcacaaacggcggcgatagccatcaggatgaccgggatcacggcagcgaaaatactgttccagaaggagggcatctcctcttcgctaaacagatgaggattaaataagccttccggtggtgctttctcaaagcgagttagcagtttagaaaacagcggtcctgcgacaataactgtcggaatggtaatgataaatccatacagtaaagtcgttccgagattagcctcaaagatagtcgcgatggcagtaggccctggatgtggcggcagaaaacagtgggttacagagagcgctgctaccattggtacgccaacatacaacaggggtaatcctgatgatgctacgatggtaaataccaacggcaacagcaggacaaaacccacttcaaaaaacatggcgaggcccacaaccagaccggtgatcactagcgcccattgcacgcgttttttaccaaaagtagcaatcagcgtagtggcgatacgttgtgccgcacccgtatcagaaatcagcttgcctaacatggccccgaaaccgaggatcattgccagcccgccgagcgtgctgccgataccattttgtatagagtgcaggacggcctgtgcatccatcccttcggcaaatccgacgacggcagctaccagaacgagggcaataaagccgttaactttaaagccgatcatcaggataagaagcagcgcgacgcctgccgcaataatgattaatggcatagtctttatctcttattagtgccagaaaagcagcgctttcgcgctgcacgtaggggggctgttaaacagccactaacatgccgccatcaacaaacaacaggtggccgtttacgaaatcagaggcttttgaagaaaggaacaccgcagcaccaatcagttcctgcggatctccccagcgtgcggcgggggtccgtttgcacaaccaggcggtgaaggcttcgtcctcaaccagtgctttagtcatttctgttttgaaatagcccggcgcaataccgttgacctgaatattgtggcgcgccagctcgacgcacatgccgcgggtgagcatttttaccgcccctttcgatgcggcataaggggtgatggtgtcacgtcccagttcgctttgcatcgagcaaatattaataactttacctgccttgcgttcaaccatgtgacgagttaccgcttgcgataccaggaacacggcggtctggtttactgcgatcacatcattccactcttgttcagggaactcagtaaaaggatgacggcgctggataccggcgttattcaccagcacatcaatggggccgatgtccttttcgatatgttcaacggcggcatcaatttcatgtttatgagtaacattaaaaggtgcggcaacggcctgaataccctcctggtggagtttttctacagcaagttctgcgcgttcggcagtaatatcattaataattatttgtgcgccatatttacccaggccggttgccagtaaaaagccaatgccctgtgctgaaccggtaatcaagatattttttcctgccagtgaaaatagatcgttcattgtattattcctttatttatctcttagaaaacaagctggacttttgctgcctgggttttatcaccggcgaaacgtagcgcctcttccaggtcagtgaagggatattcagcactcagtaaaggcagtggattgataacgccattcgccagccatgacactgcggtattaaattcgctggtaaaacggaaagagcctctgagtgaaatctccttaccaatcaacgtcatcattgggaattctgccatcgcgcctcccatacctacctgcaccattacgccgcgtgcacgagtgacctccagacaggtattcactgatgaaggatgaccggacacttcaaagctgacatcgaaatagcctttttccgctttccagtgatccatgtcgtcgttttgtgggtttacgagcacatccgcccccatctctttgcccagcgaaagggaacggggactcacatcagcacagacaatttccgcggcccccagtgttttcactgcactgacaatcaggcagccaatgggtccaacaccggaaataaatactcgcttgccctgtaactcgccggcctgatgtgcggcatgaatcgcgacggctaaaggttcggcaaaagccataaccttttcgtcagctttggccggataagggacacattgcgacgtttcgaccattttataacgggtaaaaccaccatcaacatgagggaaatacatggcactgccaaaaaaacgcatatctgtacactgattctcgttatgttcaatgcagtatttgcagtgaccgcacggtttagacggattaatggctaccgtttgcccttcatgtaattctgatgagtcgctatgaataactttaccgataacttcatgacctaacaccatcggtgcctttatcatgaaattacctacttttccttcctgataataatgtaaatcggaaccgcaaattccacctcgggttatttgtactaatgttccattattattccaatctatcgtctgctcggtaacggcaacagttttcttgcccgcaacaacgcaggactgtgttttcacttgcataaattcctcactggtcaggtagacacctcggaagcatttaagcggttttaactgtcattatttgtgatgaagatcacgtcagaaaattgttacattactatgttacgcataacgtgatgtgccttgtaattcttatcagtagaaataaaaaaacgtgaaattattatgccgccaggcgtagtatcgcagcaggtaagatgattcaggagattttaaatggcgggtgaaagctttattttgatgggcgtttcagggagtggtaaaacattaattggtagcaaggttgccgcgttattatctgctaaatttattgatggtgacgatcttcatccagccaaaaatatagataaaatgtcgcagggtattccattatctgatgaagatcgacttccctggctggaacgcttaaatgatgcttcatacagtctttataaaaagaatgaaacaggatttattgtctgttcatcattaaaaaaacagtatcgtgatattttacgcaagggtagcccccatgttcatttcctctggttagatggcgactatgaaactattctcgcgcgaatgcagcgtcgggctgggcattttatgccggtagcgttactaaaaagtcagtttgaggcactggagcgtccacaagcagatgaacaggatattgtgcgcattgatatcaaccatgatattgccaatgtcaccgaacaatgtcggcaggctgtgctggcgatacgacaaaacagaatatgtgcgaaagagggcagcgcctcagatcagcgctgcgaatgattttcaaaaatcggctttcaacaccacgcggtaacgcgccttaccgtcgcgcacatgctggatggcgtcgttaattttcgacatcgggaacagttcggtggtcggcgcaaccttgctgcgggcggcaaaacgcatcagcttacgcagctcataaggcgtgccggtagcagaaccagagacgctgcgatcgcccgcaattaacgtaaaggccggaacagacagcggcgtgagaaccgcaccgaccgtatggaaattaccgccataggtcagcgcctcaaaatagggctgccagtcgaggctgacgttgacggtgttgataatgagatcaaactgccccgccagtgctttcagtgcctgcggatcgcggctattcaccactttatcggcacccatcgccagcacttcctgctctttcgccggattagaactaaaggctgtcacctcgcatcccattgcgtgcagaagttttatagcgatatgccccagcccgccaataccaattaccccaacgcggctggtagcagtgatatggtgcatcaacagtggtttaaagaccgtgataccgccgcacaacagcggcccggcggactcgatatcaatattttctggcagtggaatcacccattgccagtccgcacgcaacttctcggcaaagccaccgcgattcataatcgtcggcaccgcaccttgctcgcagttgatctgattaccgctaatacaggcgtcgcagtgaccacagctacgcgccgtccagccaatcccgacacgctgaccgacctgcaaacctttatcctgcgcggcgctcccgagtgccaccacgcgcccaatcacctcatgcccggcaaccagcggatattgtgaaaatccccattcgttatcgatcatcgacagatcggaatggcagatcccgcagtaatccacctgcacttcaacatcttgtggcctcagctcaccgggatcgtactcataaacttccagttcgccgcccgcttcttttgcggcatagctttttatcatcgacattttttggtccttctctggtgttgtttgggaagtgtagagcatggcagggcggggtgcctggagtgtgacaaaggttacacatcgctgtatgcaatgctgaaaatttcagcacttagcgaggtgcgagcaagctggcgcttgcatggtggcgtgcgacaggtataatccacaacgttttccgcatacctcttcagtgccgaagtggcgaaatcggtagacgcagttgattcaaaatcaaccgtagaaatacgtgccggttcgagtccggccttcggcaccaaaagtatgtaaatagacctcaactgaggtctttttttatgcctgaaatccagtgtttatctatctttcccgctatattaactctctcaaggtcaaccgatatcaacgtacatctaccaacatatgttggtacagatgatggtatttccggttcgataatgcttgtaccaacagggagggaatacgatggcattaacagatatcaaagtcagagcagccaagccaacggataagcaatattagctgactgatggtggcggtatgcatctgcttgtccatccaaatggttctaagtactggcgtttgcagtaccgttatgagggaaagcaaaaaatgctggcacttggggtttatcctgaaatcacactagcggatgccagagtacgtcgtgacgaggcgcgtaagctgcttgcgaatggcgtcgatccgggagacaaaaagaaaaatgataaggttgaacagagtaaagcacgaacctttaaagaagtcgcgattgagtggcatggcaccaataaaaagtggtctgaagatcacgcccatcgtgtgctaaaaagtcttgaagataatctttttgcagcgcttggtgaacgtaatatcgctgagttaaaaactcgagatttattagcacctattaaggccgtagaaatgtctggacgtcttgaagtggccgctcgtcttcagcagcgcactacagccatcatgcgctatgcagtgcaaagtgggttaattgattataacccggcacaagagatggctggggcggttgcttcctgtaatcgacaacatcgtcccgcgcttgaattaaagcgcatccctgagttgcttacaaaaatagatagctatactggtaggccgctaacccgatgggcgatagaactcactttgctgatctttattcggtccagtgagctgcgttttgctcgttggtcagagatcgatttcgaagcgtctatatggactatcccaccggagcgggagcctattcctggagtgaaacattcccatagaggctcaaaaatgcgtacaacgcatctagtgcctctttcaacgcaagctcttgcaattttaaagcagataaaacagttttatggggcccatgacttgatatttattggtgatcacgattcgcacaaacccatgagtgagaatacggtaaatagtgcgttacgggtcatggggtatgatacaaaagtagaggtttgtggtcatggctttcgaacaatggcctgtagttcattggtcgaatcaggtctgtggtctcgtgatgctgttgaacgtcagatgagccacatggcgcgaaattcagtgagggccgcgtatatccataaagcagagcatctggaagaacggcgattgatgctacagtggtgggccgattttctggatgtaaacagagaaaggtttatcagtccatttgaatatgcaaagattaataatccattaaaacagtaatcatcccgggcaaatgcccgggaattattctaggattattttctttgttaaaaaagacaaacggtattaactgatgtatttactatttaccgctccctgcaggggggattatcagaatccgcggttattcattatttatatacattcaataaaaaagtaacctcataaaaaatcctgtactcacagggtgatgcgggataactgacgtaaggagtgctgcagggatttgatggtcccttgtagactggccccctgaatctccagacaaccaatatcacttaaataagtgatagtcttaatactagtttttagactagtcattggagaacagatgattgatgtcttagggccggagaaacgcagacggcgtaccacacaggaaaagatcgcaattgttcagcagagctttgaaccggggatgacggtctccctcgttgcccggcaacatggtgtagcagccagccagttatttctctggcgtaagcaataccaggaaggaagtcttactgctgtcgccgccggagaacaggttgttcctgcctctgaacttgctgccgccatgaagcagattaaagaactccagcgcctgctcggcaagaaaacgatggaaaatgaactcctcaaagaagccgttgaatatggacgggcaaaaaagtggatagcgcacgcgcccttattgcccggggatggggagtaagcttagtcagccgttgtctccgggtgtcgcgtgcgcagttgcacgtcattctcagacgaaccgatgactggatggatggccgccgcagtcgtcacactgatgatacggatgtgcttctccgtatacaccatgttatcggagagctgccaacgtatggttatcgtcgggtatgggcgctgcttcgcagacaggcagaacttgatggtatgcctgcgatcaatgccaaacgtgtttaccggatcatgcgccagaatgcgctgttgcttgagcgaaaacctgctgtaccgccatcgaaacgggcacatacaggcagagtggccgtgaaagaaagcaatcagcgatggtgctctgacgggttcgagttctgctgtgataacggagagagactgcgtgtcacgttcgcgctggactgctgtgatcgtgaggcactgcactgggcggtcactaccggcggcttcaacagtgaaacagtacaggacgtcatgctgggagcggtggaacgccgcttcggcaacgatcttccgtcgtctccagtggagtggctgacggataatggttcatgctaccgggctaatgaaacacgccagttcgcccggatgttgggacttgaaccgaagaacacggcggtgcggagtccggagagtaacggaatagcagagagcttcgtgaaaacgataaagcgtgactacatcagtatcatgcccaaaccagacgggttaacggcagcaaagaaccttgcagaggcgttcgagcattataacgaatggcatccgcatagtgcgctgggttatcgctcgccacgggaatatctgcggcagcgggcttgtaatgggttaagtgataacagatgtctggaaatataggggcaaatccaccttgtgctgatatgaatacggatattttatacagaatacttttcagtacaagcgactgtattacagtctgccatatatgattacctgtgatcaggaagaataagtggctgaggtttcaaactgtctgccggtatattcctctctcccttaaaaaccataacaggttagttatcttcgtctgtcagcggattgaatggcggtatattttcagtacaaataccggtcatccactgaaaaatacctgcgaaatgacgggcactgatttttctactgacgggctgatgagacgttatgtcactggcggtaataatcagtggcacactgtagcctccctgcacatgaccataatgatgaacaggattggcactgtcgctgaccgacagcccaaggccagaaaagtaaagcatggcgaaatgacgtgagtaccggcgaaggataccatcaagctggccaagaaagttatccagtttactgatgctggcgaggtaacaggcaatttttcggggatactgctccaggtaattattcggctaggagttaaggctgtcacacggatttggatgagaacccatcatgtgcaggaaaattatcttcggagaggatgtatccgccagcgcacgttctgtttcctgtaacaacagtttgtcatctgttttacgggaagcgaagctgcctttcttgaggaaagtggcatgctccgcatcagaagcaataacagagatgcgtgtgtcatgctcccccagttttccttgattggatatccaccatgtgctgtatcctgcttttgctgccagcgccaccacattgttgccggaatcagggttctgctcatagtcataaatcagtgtccggctcagggaagacactgtactggaggctgtcgaggtataatcgtcaataaataaaccgggtgccgtattcagccacggtgtggttggtacgggatagtcatacactgacatataatccctgcgcacactctcaccagtgacaataacaatcgtatcatataacggtgctcccggctggattttccagttgtcagccccgtgctactcagttgttcataacgctgcatttcacgtaatgtgtcagttgtccccacaactgttcctttaaccatccgcaatggccaacggtttacagagcataatacgaatagccgtagagccagccagttacggtggtcgcgatggtgtgtccgccagaaaatcaccacgaataccagaatcgcggcactgaccagaaaatgataaacaggaaacacggggcggttcactttgctttctcctgtagtgttttctgtaggttctgaaccggttctagcggggttgtgaggctgatggcaatcgccgggctcttcctgcatgttacactggtactgcaagagggggccttcgctcctctgacattactcagtattttcactactacaccccatctgccatccataacaaccgattcaccccctcgcgaggcgttgttgcccgtcacccggacagacaccgttatggacttctcttgttgcacgatcgatcaattgttatgcatgctgacaccacaaccccggtgggtatgaccgatgcctttctcactctcttcccggtcatcgtcggccttccccgttattgtggcgtgtcagcaccctcgacggcatttcgatggctgctcagtgttcactcacgttacggcccgcataacccgttgacttcctgaagaagtcgtttcagggagagattcagcccttttgttacctcctggaccgcttcttgtccttccagtcggagcgagagttagccggggcggactttcaccgacggaaagatcgtgcatttcaaggcacacacaacaatatctgcgagcgtgctatccgtccggtcgttatgggacgaaaggcctggttgttcgctggttcactggtggccgggaaccgcgcggcacagataatgagccttctgggaaccgcagtctggagccacatgcttggctgacggacgtcctgacgcgtctgccggagtggccggaggagaggttggctgagttactgcctcttgagggctttaccttcttcgggtaagtgatacctgccgtcaggtgtttgtgcaccgggccataacctgcagttgggaattgaacgcctgacaacaggaaatgagctagagcagtaaacacgcgggctgacaatgggtcagaatatgagttagcccggcgttattcctggggtcagtacttcagatctagcctccggtaccagactagctagcccctacgcaaccaaataaatcaaccatcgtcagagtgcaatcgttcatatacactgtcggtgatgcgctaaaaaatgcgttaatgttgagttcctcgaacccttaccaattaagggacatagccagatacgcaactggctgatgcaagcagtctaatgtctttagatccgctggcctgcgggcatgacaatgtcaaacagtcaaagattgtggcgttgacggtcagtcttggggacaaaaaagctcagtattctcgttggcaaccagataatttaacagttgatgctgaaacgaaataggcatcttggttctgtaatgccagtcagttaagcaactgactggctctttttcggggctgtggggtatttccagggcctctcctttaccactctcgggaaggccctttcccttcttgtcggtaatttcacaagttgtcccatacttgcaagatcgcgcatcagctccggtatacgtcccggtgaagcgccctgcaatgtcatcagcattctcatcaccattccgcatgattctgagaaactcagttgattcggccagtaacctttcagatgttccgccattttaatcatctgatatctcaccagattataagccagtaagacaccccacagctcttgctccacaagctccggctttttacttctcagcgtcagcctgctccgttgcatcgtctgttttatctccctgtatcccagttcgatttcccagcgatgactgtacagatcccccatttctcctccggggaagcgcatggcgtccgtcatcgacgtcagcagatggcagacttttcctttgcgcgtcacggtcagcaggcgggcagtcacttcatttcccagtcccggccacttttttcgtgcctgcgggctggttttcagcttcaccagatgatcgcctttacccagttttctgatctcttcatattgcgctccctttctgagaggtatcatccagtggcggtgttctcccgccaggctccaggcatttaacagtcccagtgagtaataacctttatccattaacgtcagagtgttatcgccggtttgttctataagttgctcagcaagctcattttcgctgttcttcatcgtgccgaaggctgcagccgtcagcagatggctggtcagttccatctggcagaccattttgacctgcgggtagagcgccgggttcccggcatgtgtctggcgggggaaggctgcatcgttctctggtgtatccggtgtgcgccagaacacaccatcgatggccagcagggtcaggccgcaccagtgcggatgcggcgtggcgttatgccagagctgcgctgttttcgtgaacacgcggcggacagcctcacttcccaggcgctggcgggcctgaataacggcactgggggcaacgaaggggcgattgcccggcagcatgatgtccaggcgattcacaatctggtgaagaggttctttacgctcaagcgccatgccaacaatacaccagaccatcatttcgaggggaagacggcgcttgcgtagcgttacagtacctgattcggcaaggcaacgagagatgagttcggggtcgaggtaatcccccagagaagtcagtgggttacgcagagaatcgtaacgggataccagatcaagagcctgtccaatgtgcataaaaaaatccggaaacaagtgagcgtttccggattcttacacagccactggatcggtcaactgatccttaactgatcggcattaatcttggttctggtgtttgtaacaaactatcagctacaaaaatatgctcaatttgtgacatcagtaacaaaacgcgttttgttatgtggattgcttgttttttgatctggtataacaggtataaaggtatacagaaaagcaaagaaatactgcaaaggaaaacagctataacgtaagctaaagtaataacctctcagtctttcctcatttgacgaagggagttttattcaacctgaacggactacgaaaatgagcacaatgaataagtcaatttttgaagcagggttgaactgtgccagtggtggaatatctggcgaacattgttttttgttggtgacccaaaactgtaggtgggtatcagttttatctttcatagagtgaaatatgttaagaagaaatggaggaaaagattgtactgattaggtattgataacaatcaatagtactggcgtatttgaagacaatataattatttctggatattgttgaggctccctaatatttactttaagggctatattagaataacacaggaaacaaatatggcaacagcatggtataaacaagttaatccaccacaacggaaagctcttttttccgcatggcttggatatgtatttgatggctttgattttatgatgatattttacattcttcatattataaaagcagatcttggcattacggatattcaggctactttaatagggacagtggccttcatagccagacctattggaggtggtttttttggtgccatggctgataaatatggtcgtaagccaatgatgatgtgggcaattttcatttactcagtcggaacaggccttagcggtattgctacaaacttatatatgctcgcagtttgccgttttattgttggcttagggatgtctggtgaatatgcatgtgcttcaacttatgcggtagaaagttggcctaaaaatcttcaatctaaagctagtgcttttttggtaagtggtttttctgttggaaatattattgcggcacaaataatccctcagtttgctgaagtatatggatggagaaactctttttttataggcctgttaccagttttactagttctttggatcagaaaaagtgctccagaaagtcaggagtggattgaagataaatataaggataaatcaacatttttgtctgtcttcagaaaaccacatctttcaatctctatgatcgttttcctcgtctgtttttgtctatttggtgcaaactggccgataaacggactacttccttcctacctggcagataatggagttaatacagtggtcatttcaactctgatgacaatagcaggtttaggaacactgacaggtacaatattttttggttttgttggtgataagattggtgtaaaaaaagcctttgtagtcggtctaataacttcatttattttcctttgtcctcttttttttatttctgtgaaaaactcttctcttataggattatgtctctttggattaatgtttacaaatttaggtattgcagggttggttccaaaatttatatatgattactttccaacaaaattaagaggattagggaccggtcttatttataacttaggggcaactggaggaatggccgcacctgtattagctacatacatttcaggatattatggcttaggtgtttcattattcattgttacggttgcattctctgccttattaattttgttagttggttttgatattccaggtaaaatttataaactatccgtggctaaatgattggaggctttatgattaattatggcgttgttggtgttggatactttggcgctgaattagctcgttttatgaatatgcatgataatgcaaaaattacatgtgtatacgatcctgaaaatggagaaaatattgcccgtgaattgcagtgtatcaatatgtcaagcttggatgctttagtctcaagtaaattagtcgattgcgtgatcgtagccaccccaaattatctgcataaagaaccagtaattaaagcagcaaagaataagaagcatgttttttgtgaaaaaccaattgcattaagttatgaagattgtgtggatatggtcaaagcgtgtaaagaagctggtgtgacctttatggccgggcatattatgaattttttcaatggggttcaatatgcacggaagttaattaaagaaggtgttatcggcgaaatattatcatgtcatactaagagaaatggctgggaaaacaaacaagagagactttcctggaaaaagatgaaagaacaatctggtggacatctatatcatcatatacatgagttagattgtgttcagcatttacttggagaaataccagagacggttactatgattggtggaaatttggcccattctggtccaggatttggcaatgaagatgatatgttatttatgaccttggaattcccgtcaggaaaactagcaaccttagagtgggggagtgcatttaactggccggaacattatgtcatcatcaatggaactaaaggctctattaaaattgatatgcaagaaacagcagggtcacttaggattggcggtcagacaaagcattttttggtccatgaaacacaagaagaagatgatgatcgtcggaaaggcaatatgacctcagaaatggatggcgctatagcatatggtcatccaggaaaaaaaacaccattatggcttgccagtttaataagaaaggagacgttattcctccataatatcctctgtggtgcaaaacctgaagaagattatattgaccttctcaatggtgaggcggccatgtcggcgattgctactgctgatgctgccactctttcaagatcgcaggacaggaaagtgaaaatcagtgagatcattaaacatacatcagtaatgtaaaaactatacgcctcttgatttaattcaggaggccttttatgtatgatcaagaattttatcttcgataatctcataattttagcagtgccatttatgataaaaacatcccttaaaaccaatctaatctttttcttcctctgtgtatttgttccccatatggcgtcataatttacgctacgtaatacgggatagttacgatacgcagcgatagcgctaagttttagttaaaatcccccatcagcgggatatggggatctctgggaggttcaggttttagcatcgcgactttaatacgacagacgctggtgacgatgatgccaagtagtgactcttccgaataaggttcccactgaccaattggcgcgcgcttcgcaataaaatctcccttcgcccagtattgggaaaagtagatacattcaaactgtgtacgctgtttcgtctcacagttcacgacattgctggccgatgagctgaccattgggcctatccgggctgtcccgatggatattacgccgaagtatgtgggaattgccagcggattgatgaacgccggttccgctgtcgccgacattatttcacctatcgcctttggcattattatcgacaaaacaggcaactggagtttaccattctacggttccgtcgcattgcttgttattggtatattcctgacgttcttcatgcgtccagataagtcattgtaaaagtcgaatcagggctgaagtggcacactgaatttggccacctgaacagaggtgatatgctcacctcagaacaacacaggtgctccaatgaaaaaaagaaatttcagcgcagagtttaaacgcgaatccgctcaactggttgttgaccagaaatacacggtggcagatgccgcgaaagctatggatgttggcctttccacaatgacaagatgggtcaaacaactgcgtgatgagcgtcagggcaaaacaccaaaagcctctccgataacaccagaacaaatcgaaatacgtaagctgaggaaaaagctacaacggattgaaatggagaatgaaatattaaaaaggctactgtagattcaatctgtcaatgcaacacccctttcaattatctctttcggtgttttgaacttcagtgtctttctcggtctgttgtttagctgagcagcaaccagatctagttcatgttgagtatattgggcaagacatgtctttttaggaaagtactgccgaattagcccatttgtgttctcatttgttccccgctgccaaggactctgaggatcgcagaagtaaactttaacgccggtgctgacagtaaattctagatgtctggccagttccattcctctgtcccatgtcagtgattttctgagttctgacggtaaactcaggaatttgtcggtaagagcctgatttactgagacagaatctttgcccctgagtctaaggatgatcgtataacgtgattttcggtctacaagtgtggctatatgagagttttttgtacctgagactaaatcgccctcccaatgccctagagagcgtctgttatcgatatttcgggaacgttcgtgaattggtgttccgttcactatgttaatcgtacctctttcgcctttgcgggtatgacgcctgccatggcgaaggctatgcgaccgtcgcagatgctgtatattcaggtggtgtagcgcttcacggctacgaaagtacagcgttttataaattgtctcaggtgatattcgcagcgttttttgacgtggttttgttcgccttaaccatcctgatatttgctctggagaccatttcatctccagcttttccagaacaagctttcgcaatggtaaattttgatccagtaagcacggttttggccttttcgccattctgttggctcggttattagcatcaacagctttgtaatagcgtctgccccgattacgctgaacttcacgtgagatcgtcgaaggactgcgattcagcgcagtagctatcgcacgaatgctcattttggctgacaaaccagctcgtatctcctcgcgctcagacagtgtcaggtgagctacagcccgcttacgctcatggggttttatgccgccagtatcccttaacatagtgaagatcgttccgggttttgaacccaggatattcgctatttcactgaagcctgttccgttcttccatagttcaaaaacagaggctttttcctctgctgtaaatgttcgtctcattcaaaaaacctccgcaaccccatgttttcacataactgttgcgttgaccaattgaatctacagttgctttttttaatatatctcgctcaaggcgagcttcatttaacgccttacgcagttgcagaatttcagattccagttcagccaccgtgcgggaaccaggagtaccgagcccttttctggcggcggtaacccattgtcctaaagtgccttcaggaagagataatcgggaagcgccttcactgatcgaaagttgattttcaagaaccgttctgacagcttcggctttgaactttttagagtaacgttgggtttttctgctcattattagctccttctgatgccattctatttcaggaaggagtgtccgttaaactcaggctacctcaggaaaaaccgtcctgaaaaaccagacggcagacgggctgtattacgcagtcaggtacttgagctacatggcatcagccacggttcggccggagcaagaagcatcgccacaatggcaacccggagaggctaccagatgggacgctggcttgctggcaggctcatgaaagagctggggctggtcagctgtcagcagccgactcaccggtataaacgtggtggtcatgaacatgttgctatccctaactaccttgaaaggcagttcgccgtgaccgagccaaatcaggtgtggtgcggtgatgtgacctatatctggacgggtaagcgctgggcgtacctcgccgttgttctcgacctgttcgcaagaaaaccagtgggctgggccatgtcgttctcgccggacagcaggcttaccatgaaagcactggaaatggcatgggaaacccgtggtaagcccgtcggggtgatgttccaagcgatcaaggcagtcattatacgagcaggcagttccggcagttactgtggcgataccggatcaggcagagtatgagtcggcgtggaaactgctgggataacagcccaatggagcgcttcttcaggagtctgaagaacgaatgggtgccagcgacgggctatgtaagcttcagcgatgcagctcacgcaataacggactatatcgttggatattacagcgcactaagaccgcacgaatataatggtgggttaccaccaaacgaatcagaaaaccgatactggaaaaactctaacgcggaggccagttttagttgaccacaacagactacctgaagggagccgcggtcgcctggcagttgcagtagcaggagatcatccagccgcagtacaggtcacgatgactctggttaatgataccggctttgaccccgtattttccggctctatcgctgaatcatggcgtcagcagccgtgcacaccatcctattgttgtgactgggaggctgccaccatgcttcgcgctttccctctggcgaaaaagggagaaggacgggcccgtctgccttcactttatgccagcttcggtaagctgggtgagacaccgactcatgaagatatcattgataacaatcgatccatcaactggcctgtataacgtggctgccggtgattaagaaagctgcacctacctaagtagtagcaaacgcacactttttagaaaaatcgatggtcagaaactggattagcaattccgttccatggttgcttttgatttacgttggcgtctgatcattgatttatcctcaaaagcccaacctcattggtaatgaaccagctccgtgaatgtccgctctggcacagagcgaaattttttgatctcccccctgaaatctaaacttagtcatgtcacgtttttgggtttctaaaattttaacttcgcgtttttcgttgccgtaagggttatacagaaatgtccgttaagcagagttcaaaattgattgccgtgatcacgactggtttgaaagccgcgcccaagcctgtacagctctggtttgcgttgattatgaacctgtcagcctaaagcaagcggatggacgatgagtattggtaatctttcagagtccggaaaagttcagccccagtctgaacaggcttgctggcgccagtccagtttcattcagtcgtggtttggttcttacggcctgtgcaatctacctcattaggcacatcggcctgccagataccggctcggggtgtatttccgcttccacgctgaatactgttctcagcaatcctggggtcatcacctcttctggtgtgccttgcgccataacatgtccgtttgccattaccaccagttgatcgcagtaccggctagcctgattaaggtcgtgcagcacagcgaccaccgttttcccctgagtccggagttcgcccatcaaccgcatcaggtccacctggtgattgatatcaagataggtggttggctcatcaagtaatacaacgggcgtattctgggccaggaccattgccagaaatgcgcgctggcgctgaccgccggaaagctcggttaaccgacgaacggcaagatgattgatccgggtctggttcatggcgacattaactcgtgcattgtcttcagcggagagacgcccccagagtgacagccagggattacgaccatacgaaaccagctcctggactgtgatcccctctggcgttaaatggtgctgaggcagcagcgaaagcctgcgggccaactggcgcgatgagagcatatttatgggattatcgccgagaaatacggtgccagactgcggcattaaaagccgcgaaaaacagtttaacagcgtcgatttcccgcaaccgttaggaccgatcagggcggtgatcttccccgttggcagtgagagtgaaacgtcgttaagtaccttgtctgtcccgtaactgaccgtcagattttcagttcgtaaagtcatttatcgcattctcacaagcaaccagacaaaccacggcgcaccgataatggcggtcagcacgccaaccgggagctccagtgggggatgaataattctcgccagcagatcggcaaccaccaacagcaacgcacctgtcagggccgaaacaggcagcagtctgcggtgacgtccaccggtgatgctacgcatcatatgcggcaccacgagaccaataaagctaatcgggccgcaggcggccacgccggtagatgtcatggcgacagctagtaacaaagcccagaatcgggtatggggcaccgacacaccgagcgtggtggcgcgcgcatcgccgagtgcaaggaggtcgagatcgcggcaaaaactcaggctcagcggcagaaataaaatcatcagcgggatggcaatcttcacaaagctccagtcacggccccataagctgccggtcagccacagcagggcgttgttcacatcctgcgggcgcgagagcatcagataatccgtcaggctggcccagcatgcagaaagcgccacgccggtgagcgccagcttcatcggctggtgggtctttgccagcatcttcagcaatatcaaccccgccatgccgcccgcaaaggccagcagcggcagcaccatcacgggcagtgacggcataagaagtagagcccccacagaggccaggctggcggcatggttaacaccgagaatatccggtgatgccagagggttgcgcacaatcccctgtatcagcacgcccgccacggcgagggctgcaccgacaaacagtgccagcagcaagcgcggcagtcggtactccatcaatacataataatgctcgtgtccggcctgccagtcggtcagcagcgcgcgccacggcacggggatcactcccatatggagtgataacagcgcacagcccgccagggcaagggtgatgaaaataaccagcgcaattttcatcctcgcctcctcacaagccagacaaagcaagggctgccaatcagcgccagcactgcgcctgcgggcagatctccggggaaggccagcgcgcgtgcgagtacatctgccagcagcatcagcgtggcccccagcagcatgctcactggcagtacgttgcgctgatcgaagcctgcccagaagcgcgccagatgtggcaccagcagaccgataaacgccaccggacctgctacgctgacgcacgcaccaaccagaagcagcactaacatattgatgaccaaacgtagcctcgtcaggttcactcccagcgtatgggcggtgctgtcgctgaggttgagcaggttcagttgattcgccagcagcaacacgacagggactgcagtgaccaccaccggcaagagctgccagacatcctgccagcgggcgtgggacactccgcctgccagccagtaaaagatgccgtaagcatgatcttcggccagcagcagggtgatgcgggtaaggcccatacaaaaggccgacagcgcgatacccgcgaggatcagtttgtttctgtcatgggtatgacgaaatccgcctcctgcggtcatgaccagcagccagctcacgccgcccccgcatgccgcgatgaatgacagagaatagcctgcaatcggcgtcggactcagcgcgctggtaagcgccatagccagcgccgcgccgctgttaatgccgagcagtgaaggagaggccattgggttgtgggtcagggtttgcagcagcgtgcccgcgagcgccaggcttgcgccgatcagaacggcgaccaggcttcgtggcaaacgaaggttttgcaccagcgcttctggtagcgttggcgtgtgtccaggcagcagggcgcgggttgcatctgctccggaaacaggaatggccgagtagcaaaacagactcagccagaaaataataataagtgctgcaacgggaagcccccacagcagcaccgggtgttttatcgcggtcatttcacaacggtaagcggctgatggtggaagatttttaccgtgtcagcggcaatacgctctgcagcaaaaataccgcgcatccgcgcccaggtgttactgtcgaccgaagcaacctgctgcttctgcgcggcggttaacatctgccagagcggatcttgttgccagcgtttaacaatgctctcttcgcgatagtgggcaaccagcagccaggcaggattgaccgccagcagttgctccaggccgatggacggcatggacgcacccgccatcgcagcgggaacgttcagccccagagaggccagcacgctgccggtccaggtctcctgagtatgcaggttgaattgctgttcgcgtgatgtgccaaaggccacgcgtgtccctttgggaagctggctggcccactgcgccatcctctctttatgttgttccagacgtgcctgcatctctcgctttttacccaccatttcgccgatgatagccgcagattgcaaattttcagcgtaggtttcgttgcgggacttaagcagcagtaccggcgcgatttgctgcaaggcgatgtaaacccccgcatggcgactgctgtcggcaatgatcaggtctggtttcagagcggcaatggcttccaggctcggctgcgcgcgcgttccgacggactgccacggtttcaggtgcgcacgcacttcgggcaggatgcgttttgcatcgttatcgtcggcaataccgatcgggatgacgtccacggcggccagcgcatcggcgaacgagagttccagcaccacaatccgttgtggcgttttttcgagtgtaaacgtgccgtgttcgtcctgaaccgtggcggcaaaggcgtggctgatcaccagcagcaggcctgcaaaaagaaaacggataaatgccaacataatcacattccagctaaaagcccggcaagccgggcgttaacacatcagaacttcaacgacccctgcatatacagcgtgcgcggctggcctgcatagatgcctttgttgttgtcgtcataagagcggatgaagtagtcctggtcgaagatgtttttcacaccgaatgccaggttcagatctgccatctgcgggccaaagtcatacgccacgcgtgcgccccagagcatgaagccgggaatgcggccggtactgccgtcggcgctctctttcaccgtattggcgttatccgcaaactggctggactggaaatcgctgttcagattgaacgtccagtttcctggcttgtagtccacgcccagcgtgcctttatgtttcggggagaatggtaccagattgccgtaggtgtcgcctttctcgcggatttccgcgttcacatacgcatagctggcgtagatggaaacgttatcaagcgttggcgttagcgtacccagatcgtaacgtgcctgcgtttccagcccggtatggcgcgttttgccacgtgcagtgacggtgtcgttggtctggttggagtcgtactgattgttaaagttaatcaggaacagccccatttccgccgtcagcgcgccgtcgtcgtagcgggtaccgagttcccaggttcgcgctttttccggttcaacattgccgctttgcacagccttgccaatctggctgtactgtacggtgccgaacgagccttcagtgtttgcataaagattccagctgtcagtcaggtgatagagcacgttcaacgccggaagcggtgcgttatagctcacttcttcgtgcgtgcctgtgatggcgttgttctggtatgactcgatatgttcgaaacgcatacccggcgtgatggtccagttgccgatgtcgattttgtcatccagataccaggcgtgcgcctcggtgccggaacgcgtatcgcggtcgtaagggcttgagccggacggcaactgcccgctgctggtggcggtgtagtaacgcatttcatgcgttgattcattcaaatagcgatagcccacgcccacttcgtgcgcggaagggccgatcataaagatctggctgtagcgtggctcaataccgcgcacccagtagttacgcggcgagagggtgatgcgtttgccttgctccaggtagccgctgcgcagggtttgggtgtagaacccctgaatgttgaatttatgctggctgtctggctggaactggtagcccaggctcgccagcttgcgacgaccccagaagcggtcatacgggcgggtggattgccagcgatcggcgtcgtaatccgcgcgagacaggccaccgggcatgtcggcttcaccgtcgtaatattgcagcaggctgttgaaggtgtgcacctcatccggcgcatatttgcttttcagcatcaggtcgtcgatgcgggtggcgctgtgctcgcgccagtcactgccgcgcgtgccggagtagagcagcgcggtgccaaaaccgttgtccgctgtgccgcccaccatcaggttgtgcgtctctttcgggttgttttgtgaagaggttgggctgagctgaccttccacgcccgcctcgataccaaagtcctgcggaatggcacgggtaacaaagttcaccacgccgcccacgctctgcggtccgtaacgcaccgcaccaccaccgcgtaccacgtcaatggcatccatgttgccgagcgaaacgggagccagtgaaagctgcggctgaccgtaaggggcgaaggggacggggatgccgtccatcaggacggtcgagcggctggcgaggcgcgggttcaggccccggatgccaaagttcatcgccaggtcgtggctgccggtgccgttgttttccggcgcgctgacgccagggatgcggttaagtacctcacgcatggtggttgcgccggttttggcgaaatcctcacggcggatcacgtcacgcgcgccagcatgttcaaatacgtcgttttcacgcgcatcacccagccagtcgccgaccacggtcagggcatcttcttttggtgcgggcgcgggctccagcgtccagctgttatttcccagcggttttacctgcagtccgctgccgtccagcagttgttgcaggccgctctcgacgtcgtaatcgccgtgcaggccgttgctctgcttgccgcgcgtcaggctggcgtcaaccgagagggtaaatccgctgtgtgcggcatactgattgagcgctttatcgagcgatcccggtgcgatattaacctgtgcagcaaaagcggaaaacgagagaccggccagcggcagcaggctcaggcgaatggtgttaaccaaaggtgttgttttacgaaaaacgcgtaacggcgtcataccttccccatcatcatttttgttgtgttcagctatgagtcgaacgagaagggtaaaaaggacaatcgaaataagaattattttccttacagtggtgaaatgtttatccagtaccgcgtaatagactgaattttaacgggaagcgtttgcgcgataacgttcaggatcgcatcggtatttttcagcgggaacgtcccgctcaggcgcagcccggcaacggcgggatcgcagcgcagcacgccgttgcggtaacgggttagcgtggctatcacctcacccagcggtttatcgctgaagctcaggatgtccttcgtccagcttgtactctcgtcatccagcggtttcactgcgccaaactcagaggcgctgaactgcaggctttcaccagcgttcacgatgcgtttttgcgcgggggcactggcgagaagcacttccacagcgtgctgctgcacgtcaagctgcgtgaaattatcctgctggcggacggtaaattctgtccctaaagcagtgagctggccctgacgggtcaggacacggaaggggcgttgcagggcatctttcgcggtagtaatggcgatttcaccgtaccagagccggacggtgcgctgatgcgcatcaaaacgcacatccgccgcgctttgggtattcagcgtgagcagggagccatcttccagttgctgacggctgactgtgcctttggcggtgcggtaatctgcccgcagaccttcgccggtttccgactgccagagctgccagcctccgccagcgccgagcaacagcagtaatcctttcatcacgtgacggcgggtgaggcgggtatcgtgcaacgcccggctggcaacgtcgccaggcacaccgccaagctggttgcgcaggttttcaacctgctgccaggcccactggttatcctgatcctgttcataccactgttgccagcgcgcttcctgttgtgggctgacgcgctcgccgcttagcacggcataccagtgggaagctgaacgcagcgcctgacggcgggaatcggttaacaaaggattcataacccatactccagacggaacagcaggcagtgctcgacggctttcgccacgtattttttcacggagctgatggaaacaccgagtttgtgcgcaatctcgctgtatgtcagaccatccagttgcgaaagcagaaacgcttcacgtgttttgccgtttagcccgtccagcatgctgtcgaggagttgtagggtctcgagttggctttcgcgttcctcaggtgaaggcgctcccccctccggcataagcgccagcatctccagatacgctttttccagcgcgtttcggcgaaacaggtccaccatcacgcgtttggcgatagtgcagaggaaggagcgaggatcgcggatcgtcgagagcgtttcgctgaccattacccgcaaaaaagtgtcctgggcaatgtcatctgcatcaaaagcagactggagtttgcgcgtcagccagcttttcaaccagccgtgatgtgtgccataaagcgactcgaacgttaaggaagctgtggtagtggcgcggtcagacatgcggagtgcatcaaaagttaattatcacgtagtcatattaatatgagaatggttatcattacaattggaaataaaattgtttccaatagacatttttaacatgttgtttttctaagtgttataaggtaggtataaaatgggatggagcctctgcttctggcatgtgtcggtcagaatgactcatgatgtggtctgctattattgacatcctcactgccctaaaggatggggatttcggtaatgctgccaacttactgatttagtgtatgatggtgattttaaggtgcttgcgtggcttccatttccatcagatgtccttcctgctccgctactgaaggcgtggtgcgtaacggcaaaagcactgccggacatcagcgctatctctgctctccttgccgtaaaacatggcaactacagttcacttacaccgcctctcagcccggtaagcaccagaaaatcattgatatggccatgaatggcgtcggatgtcgcgccagtgcacgcattatgggcgttggcctcaacacggttttacgtcacttaaaaaactcaggccgcagtcggtaacctcgcgcatacaaccgggcagtgatgtgattgtctgcgctgaaatggacgaacagtggggctacgtcggtgctaaatcacgtcagcgctggctgttttacgcgtatgacaggatacggaggacggttgtggcgcacgtcttcggtgaacgcactctggccacactggagcgtcttctgagcctgctgtcggcctttgaggtcgtggtatagatgacggatggctggccgctgtatgaatcacgcctgaagggaaagctgcacgttatcagcaagcgttacactcagcgcattgagcgacataatctgaatctgagacaacatctggcaaggctgggacggaagttactgtcgttctcaaaatcggtggagttgcatgacaaggtcatcgggcattatctgaacataaaacactatcagtaagttggagtcattaccgaccatgtttatttcatacattgtgggtattgttcttattatcgccgctaatcaataaaatcctgccccatatctacatggggcagttgttcattcttttagtgtggtaattcacacgccagcaaaaactctgccgttccttcatcaacaatcaggtccgtgacatatcctcccagcagggcacccaacgttgcgtcatagcctctttccccaccagcaaggaagatcttccgttcaatctgccttagctgagccagactgattcccagaatacgctggtcaacatcagccacgacgggcatcccttccttgtcatagaagcgaccacaaatgacacctactgcgcctaaatcccgatacgtctgcatttccttcttattcagcacgcccacccgaatcaggggattttcatcaagcgcgttacccacgacaaaaaaggctttcgtacagcgagtcagaacgtcaaaattcgatcgaataataggctctgcctgtaactccatggccagtctggcgcttgataccacggcgggcacgtgcagcgaggcgacacggcctgaaagcttgtaggcgatttgcgatgaggattcaatgatcgtcaggtctggctgagatggcatggaaccgagcatctgtataacggtgacatttttacatgacttcggcgtcatggttttgctcatctgatggattgttcttccccaggcaacccccagcacatcaccattctcaatcacctgattcagatacatgccaccggcacgtgaaaggcgagtccgcatcagctttgtatcatcacgttttccggcatgttcgccatccggcacgatgatcactctctggagattgaatttatcgcgaatttgcaaagcagcgtcgatagagccaaagacattcacatccaggttgatatgaaccagtccattttcccgggctgtttgcaggtatttgacaaccgtgacgcgggacacccccatgatagctgcaacttcagtctggcttttgccttcctgatagtacagccatgttgcatgaagtacgggatcatcattgaacaggctgctgtttgtttgatctctatccacttttgtatacctgtattaaaccggggaaatgctcatcttaaccctgtttacccggagagttgatgcagattgccagtggcatgattttatacagatattttattcttttacatgaaataaaccagcataccatttgagcgatcgcccgctgttcccccatactgtaaagccggagacatgctccggctttacagtattactgagaatacacccatcaagcataatcgaaggttcaatatcgcccctttttgatcgccagcgattcgtcaccgtgcagacggttgccgtcactcactaaattatgggggacagtgaacaacaggttggctcactggcaagaacccgattataaaactaagctggcgagcagaataaaaatcagcccactgatggataagagtgtggacatcagcgtccaggataacagcgtttctttggtggtcaggccaaaaaagtctttaatcatccagaaactggcatcgttaacgtgagaacaaatacaggatccggcaccggtagccagcgtaatcaaggccaggttggtattgggatgtactgccaacaatgggatgaccagaccggcggtagagatcgccgcgacggtggctgaacccagacaaatacgcaggaatgcggccacgccccaggccatcaggatcgggttaatatccatacccgaaaccagggtggaaatatactgaccaacgccagagtcgatgagaacttgcttgaatgcaccaccaccaccgataatcagcagcagaccggcaatacccgcgatagcttttccgcaagaatccatcaggtcagggattgttttcccgcgccccaggcccatggtatagatcgcgaatagcagtgaaatcagcatggcgatcgttgaattacctaagaacagtatcacgttgtaaaataagcctgaatccgcggcacttttggcatgagtcatctggatgatggtgacaaccgccatcaggatcaccggcagcattgccgtgagaaaactgatcccaaagcctggcatttcgctttcgctgaatcggcgggtcgcgccgagagaggctatattcccctcttttttaaaggcgtccggaataatgcgctggcagaatttattcaataccgggccgcaaagaataaaggttggaatgccgacaatgataccgtatatcagtaccaatcctacatcagcgccatattccctggcgataacagtcgggccggggtgcggcggcaaaaaaccgtgtgcgaccagcaaaccagaaagcatcggcacacacataaacatcggtgatatttttgcttcacgggcaatagcgaataaaataggtaccagaagaattaaaccgacttcgaaaaaaagtgcgataccgacaataaacgccgaacagaccactgcccagtcaagtttatttttcccgaaataattcagcatggtcagcgctattcgctgcgcaccacccgcatcggccagcaagcgaccgagcataacaccgaagccaaatatcaaaccaatatggcccagcgtaccgccaagtccggattcgactgaggtgacgactttactcaaatccataccactggcgatggcgacagcaatcgagacaataattaacgaaacaaacgtattaagcttaatttttatggttaaaagcaggagtaaagcaatccctgccacaacgataattagtggcataacgtcctctcataacagggtagcgacccatcattatccgactgagcaaataacgaatgatgcagagtcggataattcaggtgtctggatgtttttatttatgctttcagtttttattcataaaatcgcgcaaagccgcgccaattttgtttacatcataaatacaaccggtccatgtcccaccactcacggcctgaagcattgcccatagccgggtatcatctggcaattcaggatcgggaagtaaatcctgatggctgggtctggcatttaatattgcagttgcctcctcctgtgaaggtaattgttcatcgctacgggttccgaggaaattgacttcgccgtgaagctcgcgacaatcaattttaatttcaattaaatccccggtgcgtaatttaccgatggggcctccggccagcgcttctggccccacatggccgatgcacgcgccagtagaaacgcccgagaaacgtgcatcggtgattaacgaaacatgcttaccgtatgacagatgcttcagggcactggtaacctggtaggtttcttccatccctgtacctgaaggtccaacgccaataatgaccagaatatcgcccgccttgatcttgtcatgtttgatatcgtaaatcgcacttttctcggacagataaaccttcgccacacctttatggtaatagataccttgctcatcaatcatcgaggggtcaatggcggtggatttgatcaccgaaccttctggcgcaatattgcccaccgggaaggtgatagttgaggttaatccgcgcgcttttgcttgctgcggagacatgatcacttcgtcagcgttgatttgttcctgatcgagcaggagttgcttgaaccgctgacgccgttcggagtgctcccaccagtcgaggttttctttcagcgtgctgccggtaaccgtcataacgtcttcatgcaacaatccgaggctgcgcagatgcaacatgacttccggcacaccacctgccataaaggcattgaccgttggatgataaaccgggccattaggcagtacgctcaccagtcggggcacgcgcttgttgatgcggatccagtcatcaacggtcgggatatggcaacctgcctggtgagcaattgccgggatgtgtaacagcaggtttgttgaaccaccgaacgcggcatggaccgtcatcgcattctctatcgctttatcggtgagaatttcccgggtggtgatgcctttttgactcaggttcagcgcagctcgcgcggaagctctggcgatctcccgccacacaggctcaccggaaggggccagggctgaatgtgggattgccagtcccaatccttcggccaccacctgagatgtcccggcagtgcccaaaaattgacagccgccgccggaagaggcacaggctttacagcccgcacggcgtgcgtcctgtagagataattcgccattggcgaagcgtgcgccaatggtttgcaccttgccgttgtcttctccatcctttgcgggcagcgtcgcgccgccggggaccagcacggttgcgatgttgtgctgcgcggcgagtgccatcatggtggccggaagccccttatcgcaactcgccacaccaataactgctttcgcgtcgggcagagagcgaataaggcggcgcattaccatcgatgcgtcatttcggtatggtagcgaatcaaacatccccgttgtaccctgagtacgcccgtcacaaggatcggagacgtacacggcatagggcagggcatggttggctttaataacctcggccgccgctttcatctggatgtccagttcgtaatgcccctggtgcaacgccagcgccacgggtttaccgtctgcgccgcgtaagccaccgagtgtactgagcagtaaaataccgtcccgatccagctcgtccggagaccaacccattccggcattcatggtcataccgaacagatccccgctcgggcggttgataagcatctctgcggttaatgggagttcgccgtccgggccatcggcgtgcgttctgacggtgtaaatatcgtggctctcgtcagcaaaaatattgcgaacagacatgagtttctcctcagactggtaaaatgccctgcgcggtaagcagcacgtggactttatcttttgcttcttcagatgcttcaagaatcggtggtaagcaatatgtctctacaggcagcccgacacactgcatgctgtatttgatcagtgagacaaacggtgtttcgagggcgtaaatagcgggcagttgtagtagttttttattcagcgtcgcagcggtcgccagatcgccttcacgccaggcgcggtagatgccgacggagagttccggagcaaagttagcgctggcggttatcgcaccgtcgccgcccagcagcatcgtattcagcaaatgatcatcgtaaccgcagaataccgaaaacgacgggcgtaccgacttaactgtgttgatcatcgtacgcaagtgaccaacgctgtcgatggtgtctttgatgccaacgatattctcgttttgcagagccagacgcgtcacggtttccggggttaagtcctgacccgtcagatccggaaagttgtacaggatcaccggtagggtgacgctacgggcgatctgctggtaatagtcgtcaagatttcgtggtgcgactttccagtagtaggggttgatggcgacgataccatcagcgccgtaggcttgcgcatgctgcgccagtttgaccgcttcgtcagtggaaggggaaccgacgccaatcaataccggcactcgcccgtcgacaatggttacagcttcttcggcgagtgccatgcgctgggctgtattcatttggctaaattcaccaccggtacccagataaaacagcccgtcgacccctttattaatcaggaagtcggcaacttcgcgcattgcctttttatcaagggttccgtcacgatgaaacgtgctggataccggtggaataatgccgctgaattttttcattacctcagtttccttttcgtaagtgctcattttcgtttctgtatcccagcccatatgatatttgctcagcgcatttccggagcaattccagatagctgtctatcttatttcctgaataaactaccggatcgccagaaagtgagattgcatagttaactctgttatacatattgaataccggcatacttaaacataccgccccataggttgattcttcgttgtctatggcccatccccgaaggcgtgttttttgtaattcttccagaaacaattttttatcggtaaatgtattgcgcgtatgtggagttaacgtgagtgcttctaaaaaataatccagttcttctcgtgtcttccaggctaataatgccttacccaacgcggtaatatgcaactcaagttttttgccaatccagcttttgctcgtcggtacagagtccggactttcgatcttgtcgagatagatagccgaaatgctctccatcgccccaagatgacaaaccagtccacttttcagcgacaactcctgcattggccgcttagtcacctcaaatatattttgacggtgtaacgcctgacaacccaattcgtagttttttattcccagtgaatagtagccgtttttgtttttaattaagaaaccacaatccaccattacattcaataaattaagcaggctgcttttggggtactggaatttatttaataactccatataacttgccataccaacccatgcaatgtgggttaatattttttcagcacggactaatgaattacaccctttgcgaaccataatggctcctccttgctcatggaataaatggtatcggcattacatagtggaaaatatgctttgttcagcatgctgaaccgtaatgatgtgattaaatgtgatcttgtacacactttgaataatgaatccagaacagccacatttagtgaatgagaataaaaagtagatggcgtgttgttgcaacatcgtagtgtgtggattgcgcctagagcttctttattcgttcgagcgcatcgccaatattttctattgggtgccattgattatttttgcttgaaatccctctcgaatgaacttacttatcactttattgaatgaggtaaaaacaactgacatccggctcgctgataacgctgtgcaatagtctcaggtaacccgctgtcactgatgatcgttttaatacatgatagtgttgctacagcatgcggctcaacggcatcaaattttgagtgatcggccatgagaataacttcacgcgagcgttgaataatccgtgttttcaccccgacctcaaacatggtggcattggtgatccccgtctccagcgacagcgcatcgcaggagataaacgcacgttctacggaaaaggcattgatcatctccagcgccagactctctcctaccgaaaaataacctgggcgaatcagtcctccgataatgtaactttccacatggggaaaacagcccagttcattggcgattttaatgtcgttgcagatgacctttacccgcgcatcggccaggcatttcgccagttcgaggcaggttgagccggagtcgagaaaaaagcagtcgccatctttgatcattgttcgggcaagggcagctatttctcttttcgccacagattgcaatgtacgtttcacgtcgaagacgtactctttgtcgtctgtactgtcgtcgaagtccaggcaaccgtgaccgcggatcatgcctggatactggttgacaatatactggaaatcacgacggacagtcgcttccgcatagccaaaaagctccatggcctgctgtgtggagaggtgacgatgttgccacaggtagtgcagcatctgtttgatacggtcaggtctctgttggctcatcagaaacaatctcctcttacagggtggcgaattgagctaaggtcgcgcgatagtcagatgaagagaacagggcgcgcccaatcaccatatgttgcgccccagctgctgccagttgctgtgcagctgccagcgtaattccaccgtcggcccagcactcggtctgaggaaaagccgtgcgtactttttggattttctcgcacatggagggaataaaccgctgtccctgcccatcgggctcactggtcatcaccatcactccgtccagctcagacgccagatatcgccaggcgtcgatcggggttgccggattaaataccagtccggctcgtgcgccggtatggcggatctcagttaacgtttccgaaggatagtccagcgtttctgcatgaacgaagatccacgcgggtctgatttcagccagcgcgttaaaccagcgctgtggccgggcaagcatgaaatgaaaggacaagggatgaggcgtctgtctggcgacggcctgcaccgttttcatcccaaacgtaatgttgttaatgaagctgctgtcctcaatatccagatgcaggctcccaaaatccagattgtccaatgccgtcagctcacgaccatagtgcagaggatttgcgctggcgagagaagggtgcaggatcataagcgcctccgttaacctgataccagcgcaaacagtgcatcgtctgtgctggcatttcccactgccgttaagcgttgtggcgaatcaataaactggctgatgcgctgaatggtcaaaatatgtgcgttggcatccgtggcgctgacgcagagaagcagccagacggggtcgcactcctcgttaccaaaggcgaccggggtgcgtagcgtggtgatactgacctgattatagtttgcgccttgctctggtcgggcgtgaggcaaggcgattcctggggctatcagataataaggcccccagttaagggtattttcgatgatcccattaacgtagcatggctgcgcggcaccataggctaccagcgggcgggtggcgatttccacggcctgacgccagtcggtggctttacgttgtgcctgtacccatttaatatcgttaatcatccgtcgttgactccatgccgattcgggttaatctggtagcgatccccgtcgatacttttgacgaaggcggcagggatcgcagaagggttattgctctttgccggggataagcgctctgcttatccccatcttatcggcgtatatgatgcactttctccataaactgactgactcgcgcctggtcaacgaaattggcaaaaacgccgtcctttttaaaggtggttgcggtcacacagccatcggcgatactgagttgttcctccacgttttccaggcagacgcccgtgttggccaacacgacggtgtcaggcaccgtttctttgacccgttttaacagcgcgctgtcggtacgcgtcccggcggtcaggccagaaacacagagcgcatcaggatggttgttaaatactgtcgatttagcaatagaacagatatcgcgattgcccagatacacggcggcctctgggacgatattgaacaaggttttcacttcgcctgcaccaatccggtgttgatgacggatggtctcaccgacgttagtgtcccagacgccaaagtcgctggcataggcaccggtaaatatctcgcggataaacttagcgccggtagccatcgccaggtcgaatgaggcgaccggatcccacagaacattcacgccaaacgggatgcggatatcgctcattaattgcccgatgattcgtgccattgccgcagtggtttccggacgcaccttcgtgagatagggaagactaaactcgttggagaacatgactgcatccaccccaccattttggagcgccatcagatcgtcccaggctttgtcgataacccagttcatccccaactgcgcatcaaaactcgggtcgccgggcaatgcacgtagatggcacatggcgatgaccgctttttccgtcccaataacctctttcagccaactcattgaaagtactccttattccgataattcacgtttacgtaagaacagcacgacgctggcgacaataccgaccgccacgacaacgccaataatcccaagcgacatcaattcagaaatcgaccaaccgaacatattgcccacggacaacgctgagatttgcgcactttcaccggcaaaactgaaaccgcctttgagcgccatttcagtgaagtaaggcgcgaactgggtggcgatcagcaggacggtaatcatcacgatgaccccgcttatcaacgtcctgaccaggtctccgcggtggataaccgtagccatacagataaagaacggtgctaccggcaggtctgcgaggggtaacactttgttgcccggtaaaatgctggccagaattaacataatgggtatcagtagcagaccgacagcaatggtggttggatgccccagcgtcacagcagtatccagaccgatatacacttcacgtcctttgaaatatttctggaagaactttcttgcaccgtcggagatgggcagcaggccctcaacaatcaggcggatcatgcgcgggaacaacaccatgattgccgcaacggtaatcatcagactggcgcaacctttaaagccttcaccagccgccaggccaaaaatcagaccgagcactacgccgataatcaccggatcgccgaccatgccgtagcgtttctggatctcctgagcatcgatattgcgtcccttcatgaaagggattttttcatagatagcatcaagtagaacgaaaagcggtactgaactggaaccgtagccttgcggtatcgaaataccttccagcccgacgatgttctgtacccgttttgccgtccagtcggccatttttaacgatagcgccgcatggcagattgcccccagcacaccataaatcaggctaccggtcataagctggaccaccgtacccgtaatggcgtagtgccagtaattgtaaatatcgacgttcatcgttttggtcagacgggtgaccagcatggcgacattgagaagaaaaataactgggataatcatggcgccaatggctgtcgcataaccaacgccggaggcagggcctgcgccaacgtcaaagacatgcagggctaggccgaaacgctcaatcatcactttgatagggggactgaggctgtcgatcgccatgacgatcaccagtcccataccgacaaaaccaatcccaaccgttacccctgccttaatcgcctgcagccaggggatgcggaagataaggccaatcacgatcatgatgatagggacgaaaacggtaccgccgagagacaggatgtaatcaaacataatgcctccttttattgagttaacagagccttgatttgttgttttaacgcgtcgtcgttgatccctgtgagcagggcggcgccattaagcgtagggatgccgtaatcactgttggttcgcatggaggttacaataaggtccataccgttacagttaagagggatctcattcagacagcattgggcggtagtggctgaaatgccctgttcagtcaggaactcttgcagcttgtgtgcaatcatggttgaagtcgacatgccggtaccgcatgccacaaggatctttttcataatggatgtgcctcttgtgtagtgcctgaatcaggctcaacggggaaatgtgctgctgacatacctgccagagcggtcaataggcggatgcaatcagtcaaatcacgcaggctggcaacctccgccggagaatgggtatagcgacaaggaatagagagactggcgcagggaataccatcctgctcaacctggatataaccggtttctgttatcacgccgggagccacttctcgctgcaccggaatgttgtgttcaagagccgtctgttccaacatccgtatcaggcgaggaggcgtgattaatccggccagcgttccccgaccatggtagttcaggcaggtgatcccaacgccctgattaatcctgacctcggaataatcgtgtaaatcaggggtgtcacacgatggagtgatatcaataccaatcgccaggtcaggttttacacggcgtaatacgggaacaatgccgcggatattaaattcttcctgtaccgaagccaccagataaacggcgatatcaagctccatagtactgatagcatccgctacaccgagcagggcagtacagcctagacgatcgtctagtgctttactgcacaccagatcgtttgccaggagttgcggcgggttatacagagtgacaggcgtaccgacctgaatgcccatccgtatagcgtcgtctttgtctttggcaccaatatcaatccacagtttgtcgacagaaggtgactgcgtgcgctcgtcgcctttggcaaagtggtaggacttaatgccgatacaccccatgactggccctttgtccccggtgagggtgacgatggaaccagccatagtgacctgcgcaggaccgcctacgcgttcaaagcgtaaaaatccagacggctctattttgcgcaccataaaaccgacttcatccatatgcgcaaaaatcatcagtcgcagcgcatcgggtttatcactaccgtagcgcgcgacgacattcccaagcctgtctcgccagacctcttttgcctgacgcctgaattcgcacagcatgacgtcagcgacagcgttttcgtgtcctgaaatcgcattgtgctgcaaaagcgagaacagggtttcctgcacagaaaatgacatagctatctccgtagaccgtaaaacaatcactcgttgagcgttttataggcgcagactggtcgaataattgtgagaacgttcacgtgaaaacgcgcaaagctgaacaaataaaaaattatgtgagccgagtggaataaaagcgctcaacgtttgtgaaagttacgggctggagagaccagtgattatggttgaaataatgaggatgaataaaacgcggtaactgttatagcaccactttgttgcaggacgctccctcttcattacgtcctgcacgtggataccccagcatctccatcagcggatcttagaatgtaatggcgcgtggcaggtcgttggttcccagcataatgtaagaaaacatcggatctcctgaatagattcagagggagtatagataatcagctcaaatcactctccgctttatgagcccaggctggcattgccgtcagataacgttttgcacgcttatgtgcttcctccgggccgactttttgccaggaatcaaggaagctggctaaacctgataccgcttcttcccagggtttgagattgccgttgctgtcgctgcattacgcacaatattgatcactggcactgtgtgcatctggtgccgacatcggcattccgcaagcctgacagaactgttcatgttgtgacatatgatgctccttatggtgacatcttgattaataaacatactgaatatgtattgtgcaggtgatacatcagatcaaagcaaaggtaaagcctcgatattgccagccagaaataccgggaacctgttgttaccgggcgatgagtgcgaacacgccccagccaaagcattcccgcgcgtaggtcacgtagcgtttcggcgcgatgtttagttcggccctgacttcggcggcgaagtcatcgtcaggattcgcttccagccagcggcgcatggtcagccattttgcggcttcataccggtcccagccttcctggtctgccagtaccatttccaccacgtcatagccgagatcgtcgaacgctccgacaagtcctggcagcgtcaggaaatcgcttgtcgagctgacgccgcaggcctgggctatttcttctgttgctggtagctgacgccagtagggttcgccgataagcatgatcccgcccggtttcaggctttgcgctagcagctcctccgccccggcaaacccaccggcaatccatgtcgcgccgacgcaggccgccacgtcacatttttcatttgcgacgtaaccggccgcatcgttatgaataaaatgtacgcgttcgctgacgccgagttcttccgcgcgacgctttgcctgcgcggtgaagagcgaactcatgtcgatgccagtccccgtaatgccatgatccctggcccaggtgcagagcatctcgcccgagccgctgccgaggtcaagaatgcgggtgcccggcttcatgcgcagcacgcgacccagcgtggcgtacttctcttcggtgaacgggttatggatgcggtgttcactttcgctgatggtaaaaatacgtgggatatccattatttaattcctgttattgggttaagccttaaaaaggacacaacaagattgttattcacgtcagtgctccggtttcatcagggtctgcgcaccggatgtggccggtcagggtcatgggctgagcggtgagtgattgcatcatccagcaggctttgtgctcctccgggatgggataaggtgccggatagcctttgtctccggcacagggttcgaacccatgtcgggggtaataggtggcgtggccgagaacaaaaaccgtctggcagcccatcaacctcaggtgctcgatgccagtgcgtatcaaccgtcctcccacgcccatcccttggtattccggtatgaccgccaggggagcgaggatgtgcatcaacggtgaatccatttctcctttgaaggttgcccgggtaaataaaatatgcccgacggctttgccttcataccgggctagcagcgataacgcggggcgcgcgctttcatcctcaagtaaagaggccactaaatcggcttctttgctgaagccaaatgcgcgggtttcgacttcccggatatcactggcatcacttttatctgtgatatgaaaagtgaagtggtgtactgtcatagaaactctccttagcgattatcgagctgagcgcgaactttattcagctcggtggtgttgattcgatagggctggccattgacggacttgataagttttttggttttgagttttttgaagacggcgagcgtgcagtcggtcagcaacagcccttcgcggctgtagcattcaacggaagtgacgcggcctgaagaatcgcggacgtgcgcaatacgtctacctttagcgagaacgtgtaaggtatgttgttcctgacgggataaattcatactgaagaacctatttaatcatcatgtgcaaaacgtgcaaacacaccgcggtgtccgcattcgatttcggcgcattgataatcagtccggcctgaaaaggtcggggaactgattatcggatgattacattctccagcatcaaagcctcgggttgagttgaaaggtatttacggagcgaatattaacacgtagttataggagggatatgtttcagtagaaaaagtgtgatgtactttggaaattgaatgccaacccatttactggaaaaggcagatgacactgacgaatgcatgttgaagtacgcctgaaatggcctcatcggcttttcccttcgggagattattctccttttgttaaatccagaacataaatatgctcacccatcttcgatgcttgaaaaattgaagccaatcctgataagtaatttttttgaaagggtattttccggattcacaccggctttgatgagtgaaaaaccgttctcttttattcagtcaatcgtggcggtaattgcttcaattgcatatccctggcgagcataagcgggactgatggtatagccgagccaaaacacatcgcattgctgacgtaaatagatatcaccaatcaaaacctgcgtcatttgttgacaatggccaattgaatatcgcgagcaagtgtaagaactcccagcaagaccctgtaaataattctgtgtaactgcccacgattaaaggtggccgctcaggcggtcaccgtattcgataataaatgggtctggaaaaagtgcagcatctggcagcgtaatgcaggtagcccagttcaactctcactaccagtatgatcccaagttcgagcgcggaatgtatctgtatgagcatcgtcgctgtttcaataacatcatcgactactgtaactcactttgctatcacggtaagttgcagcctaaaagagggatggaaaaaggacgattttccccgcaatgggatatttacatattgatggtagaggcatgaagccaaatggagggagccgtcataaccctcttgaagctgaaacaatagcagcatggctggtggcacataaggatgatatagagcgccattacggggaaccactgtacaaagttgttggtgttgtgacgccattttcggcgcaggttaatgctatcaaaatgtcattgcgtaagctggaaattaatggcaaagacgagcagggtttactgacagtggggactgtgcactccttgcagggggcggaaagggcgattgttctcttttctcctgtctactcaaaacatgaagatggcaggtttcttgatagcaacagcactatcctcaatgttgctgtctcacgcgctaaagatagttttctggtatttggcgatatggaccttatcgagatgcagcccgcattttcgccgcgagggttattggcaaaatatctcttttcttcagataataatgcgttgcaatttgagtttcagaaacgacaggatttaatttccgcacatacacaaatttcaacgctgcatggtgtggagcagcatgatgaatttttgaacaagactcttgccggagctcaaaagaaaataacgattatttccccttggttatcctggcaaaaagtggagcaaacgggatttctggcatcaatggctttggcccgttcccggggcattgatattaccgtggtgacggataaaaactgcaatatagcgcatgtcgatgatgataagcgtcaggagaaacaacatctgctgaatgatgctgttgaaaagctcaataagatgggtatcgctacgaaattggttaatcgtgttcacagcaaaattgtgattgaggatgaagaactgctgtgtgtcggatcttttaactggttcagtgctacacgggaagataagtatcaacgatacgatacgtctttggtgtaccgtggtgaaggcgtaaaaaatgaaataaaggcaatatatggtagtctggatcaacgtcagctttaaatgtgatgagccgttcatgatacaggagtagtaaagggcatattttaccaatgttaaggcgactttccgttttattgcgagtcgcctttcctgattataaatcttattgtttacctaatcattttcctttgcataatgcgcctgggattaatggcgggtgcttttaggaatgaaagaaaatgcaagcaataatataataatggcctaatttctttgaacatcattaagcatatcatcatcgtctatttgccagaatccgtcgacttataatcgccagaacggcatatcaggacggtgctgcgaacgctgtggcccaaaacgttccagtaaactgtgtagatgttcgtagatttccgagccataatcgaaaaggcgcggatgtctattaaggcatccggctaatctgtaagcaataacaacggtttatgcggtgcgcgtttttcacccttgtgccagattattatattggcaattgcctgctgttcgagcccgcaagtgaagagatattaccttgatctcatttgttttttgttgtctactctgagaacgaacaaggacatcccccatgaataaactccccgctcacctttcgcgccaaaactgcaaaattgcttctacaaatctgtcagaaataatcccccgacgggctgcagtgctgaaatgactgcttcgcagtgccgtcgtccagttctccggtgaccggtacgctgaaccgtaatatcccgtgcttaaatcgtccgggtcttcatcaggcgcgttcgtcagtcctctttcaccttgttgctggaagtcgacgaaaataatattggctaaaacattattttgataattgccataaatagcttcatacgaatgcgggaaattttctttccagtaccaggtggtatcgccgcaaaaccacggcgcgtcagtaatattattaagctgagaatggtattgttttagatccctacgaaaggcttcaaccatatgattaaagtgttgagggtgtgacgcgtagtcactggtcattaagtcaaattcgccttgcatccagcatgcgccgaggaatttgttctgcggattttttgccagtgcggctcgcgttctgctgactaaatcctggtacagcggagtatccgttccccaacgacaagcatcatggctggctccgtgccgttctgaatatgtcccttcgctgcccgcggtaaaagccgatccgccacggcaacacggaacgataagaatccctgcattatcaggaatgaagggcagtaatttccgtgcaatatgcagtgcctggccaacggtgccgtactgtgtttgatgattcgttgccagaggatggtgataaccctgcatatcctgaacatcgtgtgggcagtgagtcagtggaataatgtcgttaaagtgacatggcgggcctccgggatgcgtatgcgcaaatctcgctaattgtttaattctgggatgaggcgcatcttccctgtccggtaatggcagtccttcgccatacgccatggcattagactgaccagcaacggtaagaacatagtaataatcgggcgatattattgcgttcatataaatttcgcgtaattgaaatgacaaattgatagcagggcccctttaccggggccctgaagcgttagttttgtactgtgactttattatccttcacagtgatcaaaactgaatccgtcaccgctttgccgcctgcagtttcaccgccaataatcaatagactattattccagggcaatgatactccgtaggcccgaccttgcgataattcacccgatttatcccatttcccgttatgccaaagatgaatatcagtgctatatgattttttcaggccttcatgcgcatagttcttaccgttctggtaattttctcgtgaacctttgaatccggcccctccggcaaatataagagaatcattgcttatccccgcaaaaccgccagctacgccatctggtgatgagacgggagcaagcttattccattttaaattattaccggtgaaatcaagttcaaatacggcatccgttcgcaatcctggtttggcttcgccattaataagccaggttttatcacctttattcacaaccgccgcaccagccgttccgtaccagggcgattcgccagcgtaactccattgctgtgttgagggatcaaaagacaacagaaacttattgaagaaataatcttctgcttttttgtcaaaatagtgagcattgattttatctatagcggttgaatcttttccagcctcgttgagatcttcaaaatagccattgaagatattctggttaacaccaccagtaacataagccttgccgttgtgtacaaaagtcacatggcccgccatgcccatcggcgcgtgcgacatcaatttaacccaactattggttttggggttgtatttgtgtacgtcattaaatacctgagtcaagccctcgctgtttttgccaatgccgccaaacacatacagattgccatcaataaatgcagaggttgcttgatctcttggtccgccagggaatgcagctaacgctgtccattttttatctttggcctgtgtatccagcttgtaccatgccgtacctgcgctacctaaaccaatgtagacagtgtcgttatcaattgctccggtaccacttttaaatggcacaggagtttccggtaatacagacgcgtttgcggcaaatgaagccatcatgatagcaagcgccgttattgttttattcattgtgactgtctcctgtctactacagtttaaatgacacaccaatgcgataactgttttccgataaattatctctgccgttgtaaacaccctgacggtcaaggtagtcatattctatgtatggcgtaatatcgggcgtcatatggtattgtagaacaaatgcattttccgtcgcccatttcttatggtttgcatagcgataatcgttctgtttgctgtatagcgtcgtttgccatgcgaaggtgaaatcactattaatatggtaagtgacatatccatcccaacgatgaacgttatcacgagacatatcaccggataagtcttgttgtcggtaagctttccagtcgtaacgatagcgaatgccaaaattaagatcttttgtcgcgtcccaggacagttttacgtagggtccgtagcgtgtgccgttgctgctaaaatgcgttaacattcccgggcgcaccgtccattgatcatcaagtttaatcgcgtaattaacttcaacctgaacatcattgagtgcggcattttcctttttattatcatgaatggtattccaggtattactttccatgcttgcccaccatccattttgccatccctcactgactttgagtcgagtctcataggcgtggcttccactacgatatccaccacgtacgtccagtgtcgcagcctgagaaattaatggggacgaaaagcacagtaataatacgccagaaagtattttagcctttttcataaatttcactcatttgtaggatacagaaagcaatacaaagcccgcataaacaattagcatttatgttgtgtaatatttttttgccaggcttatagtgtctttggcaaccggtagctgtattttatatttttttgtataaggtctcctgtgaaaaatctcttttcacattatttaaataaacagagatccagattaaatacctgagtataaaatctcttctgatgtttaattgatttgaatgttcgtaagctatatcacttactcaatccattttacccagagtcataaaatagaatgtctgttgatctcattttcatattcctttcagactgaagtgcgttttcatcacccgatgagaaagaactgaagtgatgtttgccatagattgcgagatgccctgtctcattgactatcttggtgcacctttatacctgttataccagatcaaaaatcacgcaatccatacaacaaaaccagatttgcaattcgtgtcacaaaatatgtcgatctttttctaagaggaagatgccatgtgaagccagacgaacacttgcggtggtcttcaaaaactaaagatcttagtttaactatttgttttataaataatttattaagagtctaaacaaggggagctttgcaagctaactcagtgagcttggtgaaaatcagtgtttacccgccatcaggctgagcataattctcatcatgaaatatgtttcctggtttgtggcttgtaactggtcacttctgaagtcgatctggagaggcttgttgatgttggtgttttcaggatgatgtttcacttagtttgtttgccgtatcgcccggcgaatggctgtgattgaggaaggtttaagtcgtagtgaccaaagctatatttaccaacgaatgtagatgaaaaaatcatctcctgcgttcccccatatctctaggataaaaaggaatgtaacaatctcatggcgtaagctgacgaatcagcaggaataatcgctagggacctaagaattagcatgataatagccactaagaaattactgcgctccatgaaatagccattttgtggcaaatggagttgactaataatgtcatatgtgagacggctagttgaacgaatattaaattttgctgaattttttatgttgattttacttgttacagaacatatcacatgatatatagataagattagttgcattaatgatgagggttattattagattcgtatccgattgataaatatataaaggtacatagcactgagagatcccctcataatttccccaaagcgtaaccatgtgtgaataaattttgagctagtagggttgcagccacgagtaagtcttcccttgttattgtgtagccagaatgccgcaaaacttccatgcctaagcgaactgttgagagtacgtttcgatttctgactgtgttagcctggaagtgcttgtcccaaccttgtttctgagcatgaacgcccgcaagccaacatgttagttgaagcatcagggcgattagcagcatgatatcaaaacgctctgagctgctcgttcggctatggcgtaggcctagtccgtaggcaggacttttcaagtctcggaaggtttcttcaatctgcattcgcttcgaatagatattaacaagttgtttgggtgttcgaatttcaacaggtaagttagttgctagaatccatggctcctttgccgacgctgagtagattttaggtgacgggtggtgacaatgagtccgtgtcgagcgctgattttttcggcctttagagcgagatttatacaatagaatttggcatgagattggattgcttttagtcagcctcttatagcctaaagtctttgagtgactagatgacatatcatgtaagttgctgataggtttccagttttccgctcctaggtctgcatattgtacttttcctcttactcgacttaaccagtaccaacccagcttctcaacggatttataccatggcactttaaagccagcatcactgacaatgagcggtgtggtgttactcggtagaatgctcgcaaggtcggctagaaattggtcatgagctttctttgaacattgctctgaaagcgggaacgctttctcataaagagtaacagaacgaccgtgtagtgcgactgaagctcgcaataccataagccgtttttgctcacggatatcagaccagtcaacaagtacaatgggcatcgtattgcccgaacagataaagctagcatgccaacggtatacagcgagtcgctctttgtggaggtgacgattacctaacaatcggtcgattcgtttgatgttatgttttgttctcgctttggttggcaggttacggccaagttcggtaagagtgagagttttacagtcaagtaaggcgtggcaagccaacgttaagctgttgagtcgttttaagtgtaattcggggcagaattggtaaagagagtcgtgtaaaatatcgagttcgcacattttgttgtctgattattgatttttggcgaaaccatttgatcatatgacaagatgtgtatctaccttaacttaatgattttgataaaaatcattaggggattcatcagtgcttgtactcgatttttacttcatcgcccagctgcgcgttggaccagcggccccacgactccggacgggaaatcccgctaaactgtttcacctcttctggcgcaccggcgacgttaaagatgaaactgtcggctttgtagcgaatatcgttatcaacaatcttcagcgtatcgacattgcctttgtaacgcgccatgtcgatgaccgtatctttaaatgccgttttgccctgccatgttgttttgtcaacatgctgaacaatttgctgaccgccaagctgcccttgcgagacacaccagtcggtggaaagtgccagttccggagcccagagttgtgccatcttgtagcaacggtcaacccagacgaaattgtcgcgtggagcgaaatcggccagctggaaacgcagcggtgctgagtattcgctttccggcagcggttccacgcgtttgtctgaaacccgcaacagcagcggcaaacggaaatggctacccgagaaggcaatcatgtttttctgctggtcgatggtgaactctttcatctctttagggaatttccacaggcggatgatatctggcttccacgccaatgttttctctttgatattgaggaagatttccgacatcgactgcccggataaactgctacgaccaagtccgagatagttatcgccaccgagaatgtccagcaccgtcgcgccgttatccatcgtgttacgcttcactgccagcgtctcttgctgcggcttgtcgccacgaatgacaaaaaacaggttattgcgatcctgcttattgaggtatttccacgccgtgttgttcatcgctaaatggtcagaagagacgacgatgacggtatctttaaaccacggtgacgctttgattttgttgataaacgtcgcgatgttctcctggctgcaacttaccgcgctgaatgactgattcggtttaccgtcaaaatcatattttttgcggttacaggtacgagagataaaaccatccgggtgatgggtatcgactgtcagggtaaacagtgagaatcgctgacctgagcgggaaagctcttcaaactttttccacgcttcatcgagaacggtatcgtcgtagaatccccagtcgttgcgatagtgcgggtcggctaccacgcttttcagctcttctgagccgtataagtggtcgaagccatgcgacttcaggaacacatctttaccggcaaaacgcagattcgcgccctgcacgaaatagttctgataacccgagtttttcaggatatctcccagacagatgttctgcgggaagaagctggagacagaggcggaggcgttgccttcaaagggggcaaacagcggtatgccgcactgagaagccaccatgcccgcaatcgtgtaatctgttcccggcagctgctgcgtgtggctgaaatccaggccttcatttttcaacgcgcccagttcaggcgtgagatccgggaaagcctcgttatcaaaataggtccgctcgagactttcgccgtagatataaaccaggttgagtttcgggtcagggatagttttcgacggctctttataataagccgcaaagtccgggtcgccgtcgcgtgactgggatttcaccagttccgttatctgacgaaatgccgggctggcgtccaccgaacccagcgccagtaagagcgccagcaggctgtaaccaaaatggtgcggatgatggcgacgacggcgcaggatccagcccagcgcaccgaacaccgctgtcagccccagcacaatgccgatacccggcaaaatgtatttgctgacgccagcaccggtcaggctgttggttaaggtatagagaaccgcgtcgttaataccatcgccagtaaaatagtcgctggcaaacagggtgatatttaaaacgacaaatagccccagcaccgttaacgtggctgcaaaccaccaggtgttacgtcccgctttccatgcgtaaatcagcacagaggcgagaaaaagggcgaaagagagtagttctgacaacgggcgatcctcactaaaccgggccgtttagccaacgtttaagctttttgagaagcacaatgtaatggcgtcgccatattgctgcaattctagtgtcaaaaaaatgcgatgttgttaggaattagtttataaacagacttttttgattacggtcacttcccgtgtaacaggggtaaaaccgtccaggagcagggaaaagggcaggagagagccgcgtcagccgggtaacagctaaaacgcggcgtttcgcggttcaggaaatgaagttcagcccctgttttaacaccagatcgcaggctttggttttcaccttttctgccagcggagttgttccgatgttatccagattgagttgctgaccatctttggttttcagcaaaccctgaatgccgtccagatagttggtgtcttctttttgctcttcactgttcaggcccagcttttccagcacctggttcttgatgttttcggcatcggttaccgacgccagcttttgcttcgcgcagtattgcagaatgcctgcggcattgttcatgttatctgcgcttaaggcctggtttccgctgctaagcaagttagttaatgacgcgagcgaccaaccgccttcctgtgtcgtgctgttttggttgccaagttcgctggcggcgctggagagcgcatctttccaggacgcagcatgcaccccggtggaaattaatgcgctggcggcaatggcacagcacagaagatgtttaacagttttcatcatcattactcaaggtggaattgtgtcgcagtataccgccagaaacggggattaatactctttacctgttacccggctacggtagctatcccagttgaagatcacccacaaactgttacccaggcgcatacggtccatcacgcgttcgcccagcaacttggtcatctcttccatattactgttggtcagcatcccggttgggcgtttggaagaagagcggcgatcgacgatctggttgatgatcactttttcgtatttcgattcggtctgcacgccgatctcatcgatcaccagcagatcaacgttgctcagatcgttaagcagttgttcttcgctggtaccgctattcctgaaggtatctttcatcgccgacataatatcggccacggtgatgatcaatacggatttaccgcgtagcagcagctcgttgcagattgccgccgccagatggtttttgccggttcctggcttaccagaaaagatgaagctggcgatgttgccgtcaaactcttcgacatactggcgcgctttgcttaacgcattcatctgcccttcacactcaacgcgatagttctcaaaggaacagttctgatgcagtggacgaataccggagcggttaaaggtgcgctgcattttcatcgcccgattttcacgttcgagagcggcggagcggatcgctccttgttctttttgccaggccagtagttcttcacccgttttgaatgcgggtttgatatgggcaggcatcattttttgcaggcgttgcatcaggtcgccaacgtttttcatcgttaccctctgaatcctggtggaatttggctgtcaggttcgctgaccgtattcacatctcgtttcggcagtccgccgttgctggcacgaccgatttgcaggctgcgcgccagtttttgttgccactgcacatggtgaaagactttaccttccgcctgccagtaggcaatgaatgaggccagttcttcggtggtcaccggctctcttagcgccacgccccatagcgccgccaggcggataaaatcggcatcgggttgccagtccggatacatggcgaatttccccatgggtacagcaacgggagcggcttgcggttcctgatagagttgatcgtccagagcgacatcgcttcccggacgcgccagcttttcttccagcgccagcagttcagccaggcgtgcaggcgtgacggcataaaacgccggggcattgttagcaaatacggcaaccacaccgccttcagcttttgccagaacggtttggtgatcgtgtaccagggcgtcaataccaacgacgtccggggtcaaaactctggaagacatactgtttctcaaatatggaacgatgaacgagaagggagataacttttatagtaacacacggaggagaggaggctgtctctcatccgtgtgcttaagcgaggcaattttatacgcgagggcgcttgcggtacaaccataatccaggaatggaaagaccgatggataacgcaccaacaatcgatgaagctgtaagaaagttggttaacagggtaatcatcaacggttcgctgtaacctaactggctgatttttaccgccgaaatcattgcggtataagccgatatgcccgggaacatagggataacggccgccacggtaaacactttcggatgcgccagataccagcgcgaccattgaataccaatggtaccgaccagcatagaagccataaaggttgaccactcaatattcaacccgctggtcatcaagatcattcgggaaccatgacctatcgagccaagcagcgcacaccagcgtaacgcccgcacgggaacgttgaacaccatcgcaaagccgaccgcaggaatggcggcgaggatcatatcctgcgccaacgctaacagaaattcgatcacacccatccgcgtagcccccaaatcgtcagtgccatcactacgccgacgcaggtagccagtgtcagcagactggcgatcgcccagcgtgccagtccggtattgatgtggcctttaaacatatcggcgacggcattaatcaacggaaagcccggcactagcagcagaacgctggcggccatcgcaatggtgggggtattgctgaaagtggggagttgcaaaagcaatccggaaatggtggtggcggcgaaagcggtaaggcaaaagttgatctgtggatgaagatgacgttgtgccagcagctggcggatatacatcgcggtcgtactggcaaagaaggtgatgacggcaccatcccagccaccgttattgagtttacagaaacaggcgcaagaaaggccaaccattaaggctaccagccatcttgggtaacgtaatggctgaatttggctaaatcgtttctctacgcctttgtaatccagcagatgatgctccgcaagaatcacaatgtgctggacttcagtcaccacatgcatattaatgccgcgatcgtgatttttacgtgtcgatgtcaggcattgcccatctttaatagttgtcagcactatggcgttcgaagagatagaactttcgacgctgtccattcccagtgcccgacccagtcgtgaggaaagctcatcaaccaacgcgctttccgcaccatgttgcaaaagaaataatccacactggatacaaagccgtgttacggctcgctgttgctcagtttgcataactcgccctttgtcatagacgtgctgcgtattgttcagataatgagaatccatttgtatcatgaagcacggttgttttgcggtaggttaagatcaaaattgcgctgattaatcctggttatcgggagaagctcggtgataaaaagcgaattatctctcgccgcaaacaaactatcacatgaatattatcatcataatgaatttattgtttggcctttacgaatcaggataatagataaccgggcacgttttttaatgttaacaagctaaaaccatcagatttcattgaataaatattggttgtgtgattttgcattctgcgggaagggatatcatttaattataaattaaatgaatgtgatttctgtttttcattaagtattcctaacaacttaatgtagatattttaaatgtctccaggctatttcaccaggttatcatttgatgctaaccttctgacacatgcagtggagttgttgtgcagcaggagtatgctgatatgaaagtgaatgctaaggataatttattcgcttaatctattaatttgctggaaacatttaaggaatgaatatcctgaataaaccatcataatttttagacagtggatgtggaggaaatatgttgccaggatgctgcaaaaatggaattgttatcagtaaaatacctgttatgcaagcagggttaaaagaggtcatgaggactcacttccctgaatatgaaataatatccagcgcctctgcggaggaccttaccttattacaattacgtcgttccggattagtcattgctgatttagccggtgaaagtgaagatccacgttctgtttgtgaacattattattctttaatctcacaatatcgggaaattcactgggttttcatggtgtcacgctcctggtattcccaggcagtagaactgctcatgtgccctacggcgacgttattgtctgatgttgaacccattgagaatctggtcaagaccgtacgttccggcaatacgcacgcagagcgtatcagcgccatgctgacctccccggcaatgactgaaactcatgattttagctatcgctccgtcattctcactctttcagagcgcaaggtactgcggctattaggtaaaggatggggcatcaaccagatagcttcattgcttaagaaaagtaataaaactatcagcgcccaaaaaaacagtgcgatgcgtcgactggcaattcacagcaacgctgaaatgtatgcatggataaatagcgcgcagggtgcaagagaacttaacttgccttctgtttatggagatgccgcagaatggaacacagccgaattaagaagagaaatgtcgcactcatagaaaaatgcgtcatgagtagtatcggtattgagagtttattcagaaagtttgcgggtaacccttataagctccatacctataccagtcaggagtcatttcaggatgccatgtcgcggatctcgtttgcggcggtcattttttctttttctgccatgagaagtgagcgcagagagggattatcttgcctgactgaactggcgattaagtttccgcgtacccggcgtttagttattgcggatgatgatattgaagctcggctgattggttcattgtcgccatcaccgctggacggtgtattaagtaaagcgtcaacgctggagatttttcatcaggaactctttttgtcattaaatggtgtacgtcaggcgaccgaccgactgaacaatcagtggtacattaaccaaagccggacgttaagcccgacggagagagaaatattgcgctttatgtcgcgtggctactcaatgacacaaattgccgagcagcttaaacgcaatatcaaaacgatccgtgcacataaatttaatgtgatgtcgaaactgggcgtcagttctgacgcagggttgttggaggccgcagatattctgttatgtatgcggcattgcgaaacaagtaatgtgttgcatccctattaatccgcatgatgccgggtttacttccccggcagtgctttcatttcagcgtacaatcgccacattgctgcacatccggtaagcgataacgctggcagcaagtgcggcgcaccagcaggccgtcgcgcagtaccacggtacgccagagtggattatcttcaccgttcgtgagcgttttctcaaaaaagagggcatggcgcagcgattcaacagtagcctcgccgagcagttgcttcatctcagtgagataccagttgatcaaataaccggtattactccagataagtttgccgttgatctctccggtcgcttctagtgcttgcacaaccggaaccagcgcctggctgattaacgtttccattcgatgctgcggcgaatgtggtgttgcgtttttatcttcacacacatcgacccagaaacaggcgacgcgtccggtttcgtgaaactcagcatggaaatgttccggcgacacatctaatgccttttcctgcgtcagtagcgccagcattaatggtggcaccatcaggccgatataccattgtgcccatagtgagatcagcggtttgttctcgcggatcatcatcggttggttgcgatagatatgatcggaatagaccgccagcagagaacttagcacattcggtgatgaccattgcgccagcgtcatggcgttaagtggggcaggttcatccaggcggataaactccagcaaatgttcacgatgttttgcgatcgtcgcccgcacggcttgcgcaagcgtgggatcctgcggctggagatgcgttcgccagatgacatcttcatagagcggtgcggaacgataggccataatcgggatagtaatctaaatgataatgattgctaatcatagcgataggtttacccgatagcaagggatttatctggcttgcaaatgataaaaattatcatatgatattggttatcattatcaatgaaagagatgaaatcatgttgcaacgtacgctgggcagtggctggggagtgttgctgccgggattgctgattgcagggctgatgtatgcggatttatcgtcagatcagtggcggattgtcattctgatgggattagtattgacgccgatgatgctgtatcacaaacagttgcggcattacattttgctaccatcgtgcctggcacttattgctggcatcatgctgatgataatgaatttgaatcagggatgaaaaatcaaggaagaaacaagaaaggaagtaaagataattggtgcgaggggggggacttgaacccccacgtccgtaaggacactaacacctgaagctagcgcgtctaccaattccgccaccttcgcacagtcatcttactttttttgatatcgcctcgtttggtgcgaggggggggacttgaacccccacgtccgtaagaacactaacacctgaagctagcgcgtctaccaattccgccaccttcgcccagtgcgagcaatatcaacgtggtttttggtgcgaggggggggacttgaacccccacgtccgtaaggacactaacacctgaagctagcgcgtctaccaattccgccaccttcgcataccatcaattcttaaaaagaattgctaccacggaggcgcattctagtggttttcagcttttcgtcaatagttaattatcgacagaggtgtaattgctggaaaaatgtccatcaggaaactagcgtgcaggtttggtatgcatgcgggggcagatgccagatgcgacgctggcgcgtcttatctggcctacgaagggctaacgtgcaggttttgtaggtcggataaggcgttcacgccgcatccgacacggtattcggcgagataattaacctttcttcgcctggcgggtcataatggcgcgatacaccttgaagcgccctgtttgcgcgatcacttcgtggaagccaaatgtctcatccagcacgtccggataaggcaggaaggcgttcgctacaattcgcagctcgccgccgctattaagatgacgcaccgcaccgcgaatcagcgtttgcgccgcatccaggctggtttgcatcccatcgtggaacggcgggttggagatgatcatatcaaaacgacctttcacctcggaaaagacgttgctggcaaagacttcaccttcaacaccgttggccgcaagtgttgcgcggctggcttctaccgccggggcagagacatcgcacaaggtgagacgaattttcggcgaatggcgcgcaaaggcaactgaaagcacgcccgcgccacagccgacatccagcactttacctttcgtgtgcggagttaacgtcgagagcagcaactggctaccgacatccagaccgtcgcggctaaacacgccaggcagcgttttgaccgtcaggccatcgacgctgtattcgccccagaatttctccgcatcaaataccggctgtttttccagacgaccaaaatagaggccacagcgacgagcgctgtcgactttattcaacggcgcataatctgccagcatctgctcggcgctgcgcacgccgctgcggttctcgccaacgacaaaaatatctgtccccactggcagcagagaaagtaaattcatcaactggaactgggcttccggtttgttcttcggccagtagtaaatcagcgtatcgcaatctgcgacgtcatccgccgtggcgaccagactgaaacgggcgttatcccccatctggcggcttaatacctgccagtggtggaattgctgggtatgagcacggctggccgcggtatctaaacgcgcgggcaggtcatcctgtaagtctccggcaaacagaatacggctttgttcgaaatcatcactgtgacgcagcaagacttcacttgccggggtaaatgcagacatggaatgctcctcaattgatactggcggcgattatagccatatgttggcgcggtatcgacgaatttgctatatttgcgcccctgacaacaggagcgattcgctatgacatcccgacgagactggcagttacagcaactgggcattacccagtggtcgctgcgtcgccctggcgcgttgcagggggagattgccattgcgatcccggcacacgtccgtctggtgatggtggcaaacgatcttcccgccctgactgatcctttagtgagcgatgttctgcgcgcattaaccgtcagccccgaccaggtgctgcaactgacgccagaaaaaatcgcgatgctgccgcaaggcagtcactgcaacagttggcggttgggtactgacgaaccgctatcactggaaggcgctcaggtggcatcaccggcgctcaccgatttacgggcaaacccaacggcacgcgccgcgttatggcaacaaatttgcacatatgaacacgatttcttccctcgaaacgactgatttaccggcggcttaccacattgaacaacgcgcccacgcctttccgtggagtgaaaaaacgtttgccagcaaccagggcgagcgttatctcaactttcagttaacgcaaaacggcaaaatggcggcgtttgcgattacgcaagtggtgctggatgaagctacattgttcaatattgcggtcgatcctgactatcagcgtcagggattgggaagggcgctgctggaacatctgatcgacgaactggaaaaacgcggcgtggcgacactatggctggaagtccgtgcttcaaacgctgccgccattgccctgtacgaaagtttaggctttaacgaggcgacgattcgccgcaattactaccccaccacggacggtcgcgaagacgccatcatcatggcgttgccaatcagtatgtaatacaaggtggaataatgaagtgggactggattttctttgatgccgatgaaacgctgtttacctttgactcattcaccggcctgcagcggatgtttcttgattacagcgtcacctttaccgctgaagattttcaggactatcaggccgttaacaagccactgtgggtggattatcaaaacggcgcgatcacttcattacagcttcagcacgggcggtttgagagctgggccgaacggctgaacgtcgagccaggtaaactcaacgaagcctttattaatgcgatggcggaaatctgcacgccgctgccgggcgcggtttctctgcttaacgccattcgtggcaacgccaaaatcggcatcatcaccaacggctttagtgccttgcaacaggtgcgtctggaacgcacgggcctgcgtgattacttcgatttgctggtgatttccgaagaagttggcgttgccaaaccgaataagaaaattttcgattatgcgctggaacaggcgggcaatcctgaccgttcacgcgtgctgatggttggcgacactgccgagtccgatattctcggtggcatcaacgccgggcttgcgacctgctggctgaatgcacaccatcgcgagcaaccagaaggcatcgcgcccacctggaccgtttcttcgttgcacgaactggagcagctcctgtgtaaacactgattgcctcccccccgttgatgggtaaaatagccgcaatttttcgttttcaacaagcgcggcgcgatgccgcttactcaagaagaaagaattatgacgttgtctccttatttgcaagaggtggcgaagcgccgcacttttgccattatttctcacccggacgccggtaagactaccatcaccgagaaggtgctgctgttcggacaggccattcagaccgccggtacagtaaaaggccgtggttccaaccagcacgctaagtcggactggatggagatggaaaagcagcgtgggatctccattactacgtctgtgatgcagtttccgtatcacgattgcctggttaacctgctcgacaccccggggcacgaagacttctcggaagatacctatcgtaccctgacggcggtggactgctgcctgatggttatcgacgccgcaaaaggtgttgaagatcgtacccgtaagctgatggaagttacccgtctgcgcgacacgccgatcctcacctttatgaacaaacttgaccgtgatatccgcgacccgatggagctgctcgatgaagttgagaacgagctgaaaatcggctgtgcgccgatcacctggccgattggctgcggcaagctgtttaaaggcgtttaccacctttataaagacgaaacctatctctatcagagcggtaaaggccacaccattcaggaagtccgcattgttaaagggctgaataacccggatctcgatgctgcggttggtgaagatctggcacagcagctgcgtgacgaactggaactggtgaaaggcgcgtctaacgagttcgacaaagagctgttccttgcgggcgaaatcactccggtattcttcggtactgcgctgggtaacttcggcgtcgatcatatgttggatggcctggtggagtgggcacctgcgccgatgccgcgtcagactgatacccgtaccgtagaagcgagcgaagataaatttaccggcttcgtatttaaaattcaggccaacatggacccgaaacaccgcgaccgcgtggcgtttatgcgtgtggtgtccggtaaatatgaaaaaggcatgaaactgcgccaggtgcgcactgcgaaagatgtggtgatctccgacgcgctgacctttatggcgggtgaccgttcgcacgttgaagaagcgtatccgggcgatatcctcggcctgcacaaccacggcaccattcagatcggcgacacctttacccagggtgagatgatgaagttcaccggtattccgaacttcgcaccagaactgttccgtcgtatccgcctgaaagatccgctgaagcaaaaacagctgctcaaagggctggtacagctttccgaagagggcgcggtgcaggtgttccgtccaatctccaacaacgatctgatcgttggtgcagttggtgtgctgcagtttgatgtggtggtagcgcgcctgaagagcgaatacaacgttgaagcagtgtatgagtcagtcaacgttgccactgcccgctgggtagaatgtgcagacgcgaagaaattcgaagagttcaagcgtaagaacgaaagccaactggcgcttgatggcggcgataacctcgcttacatcgctaccagcatggtcaacctgcgcctggcacaggaacgttatccggacgttcagttccaccagacccgcgagcattaattcttgcctccagggcgcggtagccgctgcgccctgtcaatttcccttccttattagccgcttacggaatgttcttaaaacattcacttttgcttatgttttcgctgatatcccgagcggtttcaaaattgtgatctatatttaacaaagtgatgacatttctgacggcgttaaataccgttcaatgcgtagatatcagtatctaaagccgtcgattgtcattctaccgatattaataactgattcagaggctgtaatggtcgttattcatcactcatcgcttttgtgatggcgaccattgacttctgtagagggtgaagtctctccctattcagcaatgcaacctcgtgttgccaggctcaaattacgagcaaacatacaggaataaatcgatgactatgacaagactgaagatttcgaaaactctgctggctgtaatgttgacctctgccgtcgcgaccggctctgcctacgcggaaaacaacgcgcagactaccaatgaaagcgcagggcaaaaagtcgatagctctatgaataaagtcggtaatttcatggatgacagcgccatcaccgcgaaagtgaaggcggccctggtggatcatgacaacatcaagagcaccgatatctctgtaaaaaccgatcaaaaagtcgtgaccctgagcggtttcgttgaaagccaggcccaggccgaagaggcagtgaaagtggcgaaaggcgttgaaggggtgacctctgtcagcgacaaactgcacgttcgcgacgctaaagaaggctcggtgaagggctacgcgggtgacaccgccaccaccagtgaaatcaaagccaaactgctggcggacgatatcgtcccttcccgtcatgtgaaagttgaaaccaccgacggcgtggttcagctctccggtaccgtcgattctcaggcacaaagtgaccgtgctgaaagtatcgccaaagcggtagatggtgtgaaaagcgttaaaaatgatctgaaaactaagtaattcgtcgtaattcgtcctcccgaactttgtcgggaggcgcgatgtgcaccacactaaaaatatcgcattgagtgattttcacgctcatatcaagcggtgacattaactatggtaaaggagacgcttatgtttcgttggggcatcatatttctggttatcgcgttaatcgccgccgcacttgggtttggtggtctggccggtaccgctgcaggcgcagctaaaattgtctttgtcgtcgggattattctgttcctggtgagtttgttcatgggccgaaaacgaccctagatttcagaccattaagaaaattttatccaaagccagtccagcggactggcttttgcggttttagcgaataataaattgcgttactttgtcattctttcacaacaaaaacaggaaggcagaggtggggcagcgaatacctgtaacgcttggtaatattgcgccgttgtcgctaaggccgttccagcctggacgaatagctctggtgtgcgaaggcggcggacagcgtggaattttcacggctggcgtgctggatgagtttatgcgcgcgcagtttaatcctttcgatctttatctcggcacatctgccggggcgcagaacctctcggcgtttatctgcaatcagcccggttacgcgcgcaaagtcatcatgcgctataccacaaaacgcgaatttttcgatccattgcgctttgtccgtggaggaaatcttatcgatctcgactggctggtggaggccactgcaagccagatgccgttgcaaatggataccgccgcgcggttgtttgacagcggcaaatcgttttatatgtgcgcctgtcgtcaggatgactacgcgccgaattactttttaccaaccaaacaaaactggctggatgtgattcgcgcctccagtgcgatacctggcttttatcgtagcggagtgtcgctggaaggcattaactacctggatggcgggatcagtgatgcgattccggttaaagaggcggcaaggcagggcgctaaaacgttggtcgtcattcgcactgtgccgtcacaaatgtactacacgccgcagtggttcaaacgcatggaacgctggctgggtgacagtagcctgcagccgctggtcaatctggtgcagcatcatgaaaccagctatcgtgacattcagcaatttattgagaaaccaccgggcaagctgcggatattcgaaatttatccgccgaagccattacatagtatcgcgcttggcagtcggattccggcgctgcgtgaagactataaacttgggcgtttatgcggtcgttatttcctcgccacggttggcaagctattaactgaaaaagcgccgcttacccgccatctggtgccagtggtgacgccggaatcgattgtcattccgcctgcgccagtcgccaacgatacgctggttgccgaagtgagcgacgctccgcaggcgaacgacccgacatttaacaatgaggatctggcttgatttgccgttttatcgacacccactgccattttgatttcccgccgtttagtggcgatgaagaggccagcctgcaacgcgcggcacaagcgggcgtaggcaagatcattgttccggcaacagaggcggaaaattttgcccgtgtgttggcattagcggaaaattatcaaccgctgtatgccgcattgggcttgcatcctggtatgttggaaaaacatagcgatgtgtctcttgagcagctacagcaggcgctggaaaggcgtccggcgaaggtggtggcggtgggggagatcggtctggatctctttggcgacgatccgcaatttgagaggcagcagtggttactcgacgaacaactgaaactggcgaaacgctacgatctgccggtgatcctgcattcacggcgcacgcacgacaaactggcgatgcatcttaaacgccacgatttaccgcgcactggcgtggttcacggtttttccggcagcctgcaacaggccgaacggtttgtacagctgggctacaaaattggcgtaggcggtactatcacctatccacgcgccagtaaaacccgcgatgtcatcgcaaaattaccgctggcatcgttattgctggaaaccgacgcgccggatatgccgctcaacggttttcaggggcagcctaaccgcccggagcaggctgcccgtgtgttcgccgtgctttgcgagttgcgccgggaaccggcggatgagattgcgcaagcgttgcttaataacacgtatacgttgtttaacgtgccgtaggccggataaggcgttcacgccgcatccggcagttggcgcacaatgcctgatgcgacgcttaacgcgtcttatcatgcctacaggtttgtgccgaaccgtaggccggataaggcgttcacgccgcatccggcagttggcgcacaatgcctgatgcgacgcttgtcgcgtcttatcatgcctacaagtctgtgccgaaccgtaggccggataaggcgttcacgccgcatccggcagtcggcgcataatgcctgatgcgacgcttgtcgcgtcttatcatgcctacaggtttgtgccgaaccgtaggccggataaggcgttcgcgccgcatccggcagttggcgcacaatgcctgatgcgacgcttgacgcgtcttatcaggcctacaagtctgtgccgaaccgtaggccgtatccggcatgtcacaaatagagcgccggaaatatcaaccggctcaccccgcgcacctttaacgcatcagccaacggctcaacgtcttccggcgtggcgctcgcccagctttgcgcctcgccatacacgccgtgggcatgaaacgcgttcaggcgtaccggaacatcgccgagtcccttgataaacgccgccagttcttcgatgtgttgcaaataatccacctggccagggatcaccagcaaacgcagttccgccagcttgccgcgctctgccagcaaatagatgctgcgcttaatctgctgattatcgcgtccggtgagttgttgatgacattcgctcccccacgctttgagatcgagcattgcgccgtcgcacaccgggagcaatttttcccagccggtttcgctcaacatgccgttactgtccaccagacaggtgagatggcgcagttgcggatcgtttttgatagcagtaaacagcgccaccacaaacggcagctgggtcgtggcttcaccgccactcaccgttatcccttcgataaacagcactgctttgcggacatggctaagcacttcgtccacgctcatggattgcgccatgggcgtggcatgttgcggacacctcttcaggcaggtatcacactgctcgcaaaccacagcgttccacaccactttgccgtcaacaatctgcaacgcctgatgcggacactgtggcacgcactccccacagtcattgcaacgtcccatcgtccacggattgtgacagtttttgcagcgcagattgcagccctgcaaaaacagagccagacgactgcctggcccgtcaacgcaggagaaggggataatcttactgactaaagcgcatctgctgttcatggcttatcacgcgcggctggcgttccagaatacgagtgttgcgtgcggcttcttcgcccagccaggtggtgttggtgcgtgaaccttcggcgcgatatttttctaaatccgacaaacgcaccatataaccggtaacgcgaaccagatcgttaccgctgacattggcggtaaattcacgcattccggctttaaaggcaccgaggcaaagctgtaccagtgcctgcgggttacgtttgatggtttcgtcgagcgtcagaatgtcgctgatgccggaataataataagcatgatgcggggcgacagtttgcagatgggtgatcggatctggctcatcgccatacggcaaacgcgcgcccggcgtggtgccgatatcggaactgatccccgactgtgcgtgtaacatggcgcgtttttgccagccatatttcacgggggtattggcgacaaactccgccagttgcgcgctgatgcgataacctacttcatttgcggcggcttctttaccgtagcgcgcggcaatcccttctttttcacacagcaagttaaccgcttccgccagcccatacatgccaaacattggcacaaaacgttcagggttaatcagcccttctttcaccaggaagctattctcaaagaagtgtgattgttgatagaggaattcacaccgcgcatcgatgatggcgatctgctgctggcagtagtgcggtagagtgcgcgtaaagaagtcatccagcgattcgctgcgctcggcaatggctttcaggttaaggcgtaccagcgtgctgccaccacccgccagcggcagtgagttgtaacagctcacaatcccgtagcccccttttgtgaaaattttatcatgcaccggaccgttggcgatgtgcggtttgctacattcacagatgttcttcgccacttccagcagcaggtcatcaggggtgatttcaggatcgtagataaaggtcaggttcggtgaaacctgcttcaactctgcatctgcacgtaagatcgcgcgggtaatgggcgaatcagacgggccgatattggcgtgcataaaggcgtctggcagggttctgtcgaggtaacgccagaaacgttttattcgaacatcgatctcgtcttgtgttagaattctaacatacggttgcaacaacgcatccagttgccccaggtagaccggcatcgatgtgaccgacggtacgtggtggtaaagaatggtcagcagagagagtgcgtcatcaagatctttcgcgccttccagctccagccattcggaaccgttcgccagaaaacgggcgtaatcgggtaagacatagcgcggtttgtacggcgcatgaccttcaaacatatcgcagattacaccttcatccagcgcgcggcgggcttcggcaggaagctgtgggtaaggcagattgttttctgcttccagtgccagaaaatggcgcttctgctccgggctaagcactgggctggtgacaatttgctggcaacgttgttgcagtgcattttcatgagaagtgggcatcttcttttccttttatgccgaaggtgatgcgccattgtaagaagtttcgtgatgttcactttgatcctgatgcgtttgccaccactgacgcattcatttgaaagtgaattatttgaaccagatcgcattacagtgatgcaaacttgtaagtagatttccttaattgtgatgtgtatcgaagtgtgttgcggagtagatgttagaatactaacaaactcgcaaggtgaattttattggcgacaagccaggagaatgaaatgactgatctgaaagcaagcagcctgcgtgcactgaaattgatggacctgaccaccctgaatgacgacgacaccgacgagaaagtgatcgccctgtgtcatcaggccaaaactccggtcggcaataccgccgctatctgtatctatcctcgctttatcccgattgctcgcaaaactctgaaagagcagggcaccccggaaatccgtatcgctacggtaaccaacttcccacacggtaacgacgacatcgacatcgcgctggcagaaacccgtgcggcaatcgcctacggtgctgatgaagttgacgttgtgttcccgtaccgcgcgctgatggcgggtaacgagcaggttggttttgacctggtgaaagcctgtaaagaggcttgcgcggcagcgaatgtactgctgaaagtgatcatcgaaaccggcgaactgaaagacgaagcgctgatccgtaaagcgtctgaaatctccatcaaagcgggtgcggacttcatcaaaacctctaccggtaaagtggctgtgaacgcgacgccggaaagcgcgcgcatcatgatggaagtgatccgtgatatgggcgtagaaaaaaccgttggtttcaaaccggcgggcggcgtgcgtactgcggaagatgcgcagaaatatctcgccattgcagatgaactgttcggtgctgactgggcagatgcgcgtcactaccgctttggcgcttccagcctgctggcaagcctgctgaaagcgctgggtcacggcgacggtaagagcgccagcagctactaagtaagatgctttacgcctgatgcgctgcgcttatcaggcctacgagacgtatctacccgtaggccggataaggcgtagacgcatccggcaaaagccgcctcatactcttttcctcgggaggttaccttgtttctcgcacaagaaattattcgtaaaaaacgtgatggtcatgcgctgagcgatgaagaaattcgtttctttatcaacggtattcgcgacaacactatctccgaagggcagattgccgccctcgcgatgaccattttcttccacgatatgacaatgcctgagcgtgtctcgctgaccatggcgatgcgagattcaggaaccgttctcgactggaaaagcctgcatctgaatggcccgattgttgataaacactccaccggtggcgtcggcgatgtgacttcgctgatgttggggccgatggtcgcagcctgcggcggctatattccgatgatctctggtcgcggcctcggtcatactggcggtacgctcgacaaactggaatccatccctggcttcgacattttcccggatgacaaccgtttccgcgaaattattaaagacgtcggcgtggcgattatcggtcagaccagttcactggctccggctgataaacgtttctacgcgacccgtgatattaccgcaaccgtggactccatcccgctgatcaccgcctctattctggcgaagaaacttgcggaaggtctggacgcgctggtgatggacgtgaaagtgggtagcggcgcgtttatgccgacctacgaactctctgaagcccttgccgaagcgattgttggcgtggctaacggcgctggcgtgcgcaccaccgcgctgctcaccgacatgaatcaggtactggcctccagtgcaggtaacgcggttgaagttcgtgaagcggtgcagttcctgacgggtgaatatcgtaacccgcgtctgtttgatgtcacgatggcgctgtgcgtggagatgctgatctccggcaaactggcgaaagatgacgccgaagcgcgcgcgaaattgcaggcggtgctggacaacggtaaagcggcagaagtctttggtcgtatggtagcggcacaaaaaggcccgaccgacttcgttgagaactacgcgaagtatctgccgacagcgatgctgacgaaagcagtctatgctgataccgaaggttttgtcagtgaaatggatacccgcgcgctggggatggcagtggttgcaatgggcggcggacgccgtcaggcatctgacaccatcgattacagcgtcggctttactgatatggcgcgtctgggcgaccaggtagacggtcagcgtccgctggcggttatccacgcgaaagacgaaaacaactggcaggaagcggcgaaagcggtgaaagcggcaattaaacttgccgataaagcaccggaaagcacaccaactgtctatcgccgtatcagcgaataacggtatactgatctgatcatttaaatttgaagcactgagtacggagaacatatgaaacgtgcatttattatggtgctggactcattcggcatcggcgctacagaagatgcagaacgctttggtgacgtcggggctgacaccctgggtcatatcgcagaagcttgtgccaaaggcgaagctgataacggtcgtaaaggcccgctcaatctgccaaatctgacccgtctggggctggcgaaagcacacgaaggttctaccggtttcattccggcgggaatggacggcaacgctgaagttatcggcgcgtacgcatgggcgcacgaaatgtcatccggtaaagataccccgtctggtcactgggaaattgccggtgtcccggttctgtttgagtggggatatttctccgatcacgaaaacagcttcccgcaagagctgctggataaactggtcgaacgcgctaatctgccgggttacctcggtaactgccactcttccggtacggtcattctggatcaactgggcgaagagcacatgaaaaccggcaagccgattttctatacctccgctgactccgtgttccagattgcctgccatgaagaaactttcggtctggataaactctacgaactgtgcgaaatcgcccgtgaagagctgaccaacggcggctacaatatcggtcgtgttatcgctcgtccgtttatcggcgacaaagccggtaacttccagcgtaccggtaaccgtcacgacctggctgttgagccgccagcaccgaccgtgctgcagaaactggttgatgaaaaacacggccaggtggtttctgtcggtaaaattgcggacatctacgccaactgcggtatcaccaaaaaagtgaaagcgactggcctggacgcgctgtttgacgccaccatcaaagagatgaaagaagcgggtgataacaccatcgtcttcaccaacttcgttgacttcgactcttcctggggccaccgtcgcgacgtcgccggttatgccgcgggtctggaactgttcgaccgccgtctgccggagctgatgtctctgctgcgcgatgacgacatcctgatcctcaccgctgaccacggttgcgatccgacctggaccggtactgaccacacgcgtgaacacattccggtactggtatatggcccgaaagtaaaaccgggctcactgggtcatcgtgaaaccttcgcggatatcggccagactctggcaaaatattttggtacttctgatatggaatatggcaaagccatgttctgatggatttgggcggagcgttgactccgcctttgttatgtcacaaaaaggataaaacaatggctaccccacacattaatgcagaaatgggcgatttcgctgacgtagttttgatgccaggcgacccgctgcgtgcgaagtatattgctgaaactttccttgaagatgcccgtgaagtgaacaacgttcgcggtatgctgggcttcaccggtacttacaaaggccgcaaaatttccgtaatgggtcacggtatgggtatcccgtcctgctccatctacaccaaagaactgatcaccgatttcggcgtgaagaaaattatccgcgtgggttcctgtggcgcagttctgccgcacgtaaaactgcgcgacgtcgttatcggtatgggtgcctgcaccgattccaaagttaaccgcatccgttttaaagaccatgactttgccgctatcgctgacttcgacatggtgcgtaacgcagtagatgcagctaaagcactgggtattgatgctcgcgtgggtaacctgttctccgctgacctgttctactctccggacggcgaaatgttcgacgtgatggaaaaatacggcattctcggcgtggaaatggaagcggctggtatctacggcgtcgctgcagaatttggcgcgaaagccctgaccatctgcaccgtatctgaccacatccgcactcacgagcagaccactgccgctgagcgtcagactaccttcaacgacatgatcaaaatcgcactggaatccgttctgctgggcgataaagagtaattgtgtttcgctgcaaggcgattgccttgtgaagccggagcgggagactgctccggctttttagtatctattcatttttctctccagcttgaatattttcgctatacttttcagtgaaatgtgttaataaatctattcaagtatctattcacgaatctattcattaatgagcgagctgactgatcttttactgcaagggccgcgttctgccccggaattgcgccagcgtctggcaatcagtcaggcgacgttctcacgccttgttgccagagaagatcgggtgattcgctttggtaaagcacgggcaacgcgatatgcactgctgcgtccttatcgcggaattgagcgtattcccgtctggcgggtggacgataccggaaaggcgcataaattcgccgacatccggttgtgctggccgcagggaagttgtctggtaacaggcgcagatggcgacgaacagtggtttgatggtttgccctggtatttgaccgatctccgaccgcagggctttttagggcgcgcgtggggcaggaagttagccgcgcaactgaatctgactgatgatatacgtctctggcaggaagaagatgtgctctacgccctgaccgtatttaacggtgaatatactggcggttggttggtcggggaggggaattatcagcgatggattactgcacaacaccctgcggaaattcctctggatcaaaaactcacccattacgaacagctggcaagtgatgcactggcaggagaaattgtgggttcttctgcgggcggcgagcagccaaaatttacctactatgcacaaacgccgtcaggcaataaacatgtgttggtgaaattcaccgtaccacagcaaaccgcggtcagccaacgttggggtgacctgctaattgctgaatctattgccgcgcaaatcctgcgtgacggtgggatccacgccatcgagtcaacggtgcttgtaacaagtaacaggcaggtattcctcgaagcggaacgctttgactgcaaaggtaacgatggtcgcttgcctattgtgtcgctggaggcggtgcagagtgagtttatctcttctccgggatcgtggccgcaggcaatgcgccgtttgtgtgagcaacaacttgtcactcaccagagcgtggcgcaaacagaagtgatctgggcatttgggcgacttatcgccaacagcgatatgcacgcaggtaatttatcgttttatttatctgaaccgccatttgcgctgacgcccgtctacgacatgctgccgatggtctatgcaccaaacagcgctggaatgctgcgtgatgctgccattgaggtgaagtttgatcttaacgtcagtaaaagcgcttggttaacggcgatcccgctggcgcagcagttctggcaaacggtcgccagagatccgcgtatcagcgaggcgtttcgccacattgcgcaagaaatgccggaaaaaatccggcaaatcgaagagaaagttgcccgcatgggcgggtaactaccttacagcccccgccatccatgccgataactcccgtagctctttttcctgttccgggaagtcaaccaacagcgcttcgcactcctgttgcagcatatctgcgcggtacaggcagccttgcagtcgtccggcgagggcttccagcggcgcggggttgaggctgtcggtaaacacctgggcgcgggtgatatggcctttttcaacgtcgaaatgcagttccacgccgccccaggtaaagcgttcatccagcagatgcgagaatgccggagcctgaccgaagttccattcccagctactctggcgggcaaaggtttcggcgaagtttggcaagtctggcgttttgttcggggagatgatttccgcttccacgcgctcgccataatgggcgaaaaaggcctcggttatggcctcgcaaacctgctcatgggtgatccccggcaacagctcggtgaggttggtcacgcgggaacgtaccgacgtaatgcctttcgccgccagtttctttttatccggattgagatagtttgccaggcggctgaggtcggcattgagtagcaaggtgccgtggtggaagccgcgatctttggtttcgcgataggccgagcctgagactttgcggtcgccttcgacggttttcaccaccagatcgttacgtccggacgcttcggcgctgacgccgagcgcgttcagcgcattgagcacaatcgacgtggagatagttttatcgtactccggcttgccagccataaaggtaaagcaggtattgccgagatcgtggaacaccgcgccgccaccgctactgcgccgcgccaggcggacgttatcttcttccatccgccgggtattacactctttccacgggttctgcgcgcgaccaattactaccgtgtcggcattgcgccagagaaacagaacgcgctgcgtggcgggcatttggcgaaaaatacactcttccaccgccaggttaaaccacgggtcgtaagagtcagagatgagcaggcgtaatgtggacataacgatttcctttcttgtagtaatgggtcactcttttttctcgctttcttcctcttccggcaccggtttgctggcggttaacaggaagggcgattgctgccagcgggtgcgtttaccctgtagcagcgtgcgggtcagcactacaccgattgccagtgagagcagcaacatcaggcgtaaaatgttagtggtgttatccacctgttgggcttcggtggcgagcgtatgggtgtcgagtgtcaggcgcagatagccgagcggtccgtttttacccgcaattggctcgacaatctgctggttaaaatagccgcctgcttttttaccgtcgagcgccagccggtcgcgcacttcgacgctttcgccagaacgtgcgataagatcgccttgttcgtcatacacacccgcgtcgaggatacggctttcatccgttaactgatcgaggatcgcctgaatgcgtttttcatccggtgagtcggtacgcatcagcggtgcaacgttcagcgtcacctgacgcgccagggtgcgggccagttcttccagctgtggattacgctgtcgctggtggttttgactaaaccatgacgctccctgcatcagcgccactaacaaggcaagacagaacaggacaatcactgcccgatgcagccggaatttcagttttgtgcgagccatcttccaccctttgaaaatttgagacttaatgttgccagaagcaatggatacaaggtagcctcatgcgttattttccctgcttcgaacgattttacaggagccttaatgcctaacattacctggtgcgacctgcctgaagatgtctctttatggccgggtctgcctctttcattaagtggtgatgaagtgatgccactggattaccacgcaggtcgtagcggctggctgctgtatggtcgtgggctggataaacaacgtctgacccaataccagagcaaactgggtgcggcgatggtgattgttgccgcctggtgcgtggaagattatcaggtgattcgtctggcaggttcactcaccgcacgggctacacgcctggcccacgaagcgcagctggatgtcgccccgctggggaaaatcccgcacctgcgcacgccgggtttgctggtgatggatatggactccaccgccatccagattgaatgtattgatgaaattgccaaactggccggaacgggcgagatggtggcggaagtaaccgaacgggcgatgcgcggcgaactcgattttaccgccagcctgcgcagccgtgtggcgacgctgaaaggcgctgacgccaatattctgcaacaggtgcgtgaaaatctgccgctgatgccaggcttaacgcaactggtgctcaagctggaaacgctgggctggaaagtggcgattgcctccggcggctttactttctttgctgaatacctgcgcgacaagctgcgcctgaccgccgtggtagccaatgaactggagatcatggacggtaaatttaccggcaatgtgatcggcgacatcgtagacgcgcagtacaaagcgaaaactctgactcgcctcgcgcaggagtatgaaatcccgctggcgcagaccgtggcgattggcgatggagccaatgacctgccgatgatcaaagcggcagggctggggattgcctaccatgccaagccaaaagtgaatgaaaaggcggaagtcaccatccgtcacgctgacctgatgggggtattctgcatcctctcaggcagcctgaatcagaagtaattgctcgcccgccatcctgcgggcggcacagcattaacgaggtacaccgtggcaaaagctccaaaacgcgcctttgtttgtaatgaatgcggggccgattatccgcgctggcaggggcagtgcagtgcctgtcatgcctggaacaccatcaccgaggtgcgtcttgctgcgtcgccaatggtggcgcgtaacgagcgtctcagcggctatgccggtagcgccggggtggcaaaagtccagaaactctccgatatcagccttgaagagctgccgcgtttttccaccggatttaaagagttcgaccgcgtactaggcggcggcgtggtgccaggaagtgccattctgattggcggtaaccctggtgcggggaaatccacgctgctactgcaaacgctgtgcaaactggcccagcagatgaaaacgctgtatgtcaccggcgaagagtcgctgcaacaggtggcaatgcgcgctcatcgccttggcctgccgactgacaatctcaatatgttgtcggaaaccagcatcgaacagatctgcctgattgccgaagaagagcaaccgaagctgatggtaattgactcgatccaggtgatgcatatggcggatgtacagtcatcgcctggtagcgtggcgcaggtgcgtgaaacggcggcttatttgacacgcttcgccaaaacgcgcggtgtggcgattgtcatggtggggcacgtaaccaaagatggttcgctggctggcccgaaagtgctggaacactgtatcgactgttcggtgcttttggatggcgatgccgactcccgttttcgcaccttgcgcagccataaaaaccgcttcggcgcggtgaatgagctgggcgtcttcgcgatgaccgaacaggggctgcgtgaagtcagcaacccttcggcaattttcttaagtcgcggcgatgaagtgacctccggtagctcagtgatggtggtatgggaaggaacgcgtccactgctggtggagattcaggcgctggtcgatcactcgatgatggcgaacccacgccgcgtggcagtggggctggaacaaaaccgtctggcaatcctgctggctgtgttgcaccgtcacggtggtctgcaaatggccgatcaggatgtgtttgtgaacgtggtcggcggcgtgaaggtaaccgaaaccagtgccgacttagcgttactgctggcgatggtttccagcctgcgcgacagaccgctgccgcaggatctggtggtgtttggtgaagtcgggctggcaggggagatccgcccggtgcccagcggtcaggaacgaatctctgaagcggcgaaacacggttttcgccgggcgattgttccggcggctaacgtgccgaaaaaagcgccggaagggatgcagatttttggcgttaaaaaactctccgacgcgcttagcgtgttcgacgacttataatgagatatacggagggagatatgtcgtcatttgattacctgaaaactgccatcaagcaacagggctgcacgctacagcaggtagctgatgccagcggtatgaccaaagggtatttaagccagttactgaatgccaaaatcaaaagccccagcgcgcaaaagctggaggcgttgcaccgttttttggggcttgagtttccccggcagaagaaaacgatcggtgtcgtattcggtaagttctacccactgcataccggacatatctaccttatccagcgcgcctgtagccaggttgacgagctgcatatcattatgggttttgacgatacccgtgaccgcgcgttgttcgaagacagtgccatgtcgcagcagccgaccgtgccggatcgtctgcgttggttattgcaaacttttaaatatcagaaaaatattcgcattcatgctttcaacgaagagggcatggagccgtatccgcacggctgggatgtgtggagcaacggcatcaaaaagtttatggctgaaaaagggatccagccggatctgatctacacctcggaagaagccgatgcgccacagtatatggaacatctggggatcgagacggtgctggtcgatccgaaacgtacctttatgagtatcagcggtgcgcagatccgcgaaaacccgttccgctactgggaatatattcctaccgaagtgaagccgttttttgtgcgtaccgtggcgatccttggcggcgagtcgagcggtaaatccaccctggtaaacaaacttgccaatatcttcaacaccaccagtgcgtgggaatatggccgcgattatgtcttttcacacctcggcggtgatgagatcgcattgcagtattctgactacgataaaatcgcgctgggccacgctcaatacattgattttgcggtgaaatatgccaataaagtggcatttatcgataccgattttgtcaccactcaggcgttctgcaaaaagtacgaagggcgggaacatccgttcgtgcaggcgctgattgatgaataccgtttcgatctggtgatcctgctggagaacaacacgccgtgggtggcggatggtttacgcagcctcggcagttcggtggatcgcaaagagttccagaacttgctggtggagatgctcgaagagaacaatatcgaatttgtgcgggttgaagaggaagattacgacagtcgtttcctgcgctgcgtggaactggtgcgggagatgatgggggagcagagataaccgtgatgaaactgctcaaaggcgaggtataaaatgagtttttttgatgagttgaaaacctctctggaagaggctgtcgagattaaacaaggtttgaaaaaacctgcacgggtgacccgccacgaaattgaggatgctaaggctgttgtagaccggaaacggtgttcacgccgcatccggcattcggtgctcaatgcctgatgcgacgcttaccgcgtcttatcaggcctacagttttacaacgtattgaaattgctggttttgtaggccggataaggcgttcgcgccgcatccggcattttacgcattacttcgcaatacgcttgtacttgatacgcttcggctccagcgcgtctgcgcccagcgtgcgtttcttgtactcttcgtactcggtaaagttaccttcgaagaactcaactttaccttcatcctggtaatccagaatgtgcgtggcgatacggtcgaggaaccaacggtcgtgcgagataaccatcgcacagcccgggaactccagcagggcgttttccagcgcgcgcagggtttcgatatccaggtcgttggttggttcgtcgagcagcagcatgttgccgccaacctgcagcagcttcgccagatgcagacgaccgcgctcaccaccggagagttcaccaacgcgtttaccctgatcaacccctttaaagttaaagcggccaacgtaggcgcggcttggcatctcggtgttgccgatcttcatgatatccagcccgccggaaacttcttcccaaacggttttgctgttatccattgagtcacggaactgatcaaccgacgccagtttcaccgtttcacccaaagtgatggtgccgctgtccggctgttcctgaccagagatcatacggaacagggtcgatttacccgcaccgttcggaccgatgatcccgacgatcgctcctttcgggatcgagaagctcaggtcatcaatcagcagacgatcgccataggatttacgcaggttgctgacttccagcactttatcgcccagacgcggtccaggtggaataaacagttcgttggtttcgttacgtttctgatattcggtgctgttcagttcttcaaagcgcgccagacgtgctttacctttcgactgacggcctttagtaccttgacgtacccattccagctctttctcaatcgacttacgacgcgccgcttcttgtgaagcttcctgcgccaggcgctgatctttctgctccagccaggaggagtagttaccttcccacggaataccttcaccgcggtcaagttcgaggatccagcctgcaacgttatcgaggaagtaacggtcgtgggtaatcgccacaacggtgccttcgaagtcgtgcaggaagcgttccagccaggccacggattcggcatccaggtggttggtcggttcgtcgagcagcagcatgtctggtttttccagcagcaggcggcacaacgctacgcgacgacgttcaccaccggagaggttagcgattttcgcgtcccagtccggcagacgtagcgcatccgccgcacgctccagctgtacgttcagattatgaccgtcgtgagcctgaatgatctcttccagacggccttgttcagcggccagcttgtcaaaatcggcatccggatcggcgtacagcgcatacacttcatccaggcgtttcagggcgttaaccacttctgaaaccgcttcttcaatggactcacgcacggtgtgttccgggttcagctgcggttcctgcggcagataaccaatcttgatgtctggctgcggacgcgcttcaccttcgatgtctttatcaatgcccgccataatgcgcagcagggtggacttacccgcgccattcagacccaggacaccaatttttgccccagggaagaaactcagagagatgtttttcaaaatatgacgtttcggcggaacaactttgccgacacgatgcatggtataaacgaattgagccacgttggacttcgcctctatgtttatcgtgataatgagttttcaaaggcgaagtgtagcctttttccccgcctaatcccagccggtcgatcaccctcgcagtaaaagtaaaaaagtgtccgtaacgtggcgtaaacggcaatgactggttagcataaatctattacgcggcatgacgctgcattgatgtatttacacttagaggatgcgcttgtggaaaaagccaaacaagttacctggcggctgttggctgccggtgtctgtctgctgacggtcagcagcgtggcgcgagccgactcactggatgagcagcgtagtcgttacgcgcaaatcaagcaggcctgggataatcgacaaatggatgtggtcgaacaaatgatgcctggactgaaggattatccgctttatccctacctggaataccgccagatcaccgatgatctgatgaatcaaccggcggtgacggtcactaactttgttcgcgctaaccccacgcttcctcccgctcgcacgctgcaatctcgtttcgtcaatgaactggcgcggcgtgaagactggcgtggcttgttagcctttagcccggaaaagcccggaactaccgaagcgcaatgtaattactactatgcgaaatggaacaccgggcagagtgaagaagcctggcaaggggcgaaagagctgtggctaaccggcaagagccagcctaacgcctgtgacaagttatttagcgtctggcgtgcgtcaggtaaacaagatccgctggcgtatttagagcgtatccgtctggcgatgaaagcgggtaacacaggcctggtaacagtgctggcagggcagatgcctgccgattaccagactatcgcctcggcaatcatttcactggcgaacaaccctaatacggtactgaccttcgcgcgtacaactggcgcgaccgattttacccgtcaaatggcggcggtggcgtttgccagtgtggcgcggcaggatgctgagaatgcacggctgatgatcccatcgcttgcccaggcgcagcagcttaatgaagatcagattcaggagctgcgcgatatcgtcgcctggcgtttgatgggcaacgatgtcaccgacgagcaggcgaaatggcgcgatgacgccattatgcgctcgcaatctacttcgcttattgaacgccgtgtacgaatggcgcttggcaccggcgatcgtcgcggcctgaatacctggctggcgcgtctgcctatggaagcgaaagagaaagatgaatggcgttactggcaggcggatttattgctggaacgcggacgtgaagctgaagcaaaagagattttgcatcaactcatgcaacagcgtggtttctacccgatggttgcagcacaacgcatcggcgaagagtatgagctgaagattgataaagcgccgcagaatgttgacagcgccctgactcaggggccggagatggcgcgcgtgcgcgagttgatgtactggaatctcgataataccgcgcgtagcgagtgggccaatctggtgaagagcaagtcaaaaacagagcaggctcaactggcgcggtatgctttcaacaaccaatggtgggatcttagcgttcaggcaacgatcgccgggaagctgtgggatcatctggaagagcgattcccgctggcttacaacgatcttttcaaacgctacaccagcggtaaggagatcccgcaaagctatgcgatggcgattgctcgtcaggagagcgcctggaatccgaaagtgaaatcaccggtaggggccagcggcttgatgcagattatgcctggtacagcgacccatacggtgaagatgttctctattcccggttatagcagtcctgggcaattgctggatccggaaacgaatatcaacattggcaccagttacctgcaatatgtttatcagcagtttggcaataatcgtattttctcctcagcagcttataacgccggaccagggcgggtgcgaacctggcttggcaacagcgccgggcgtatcgacgcagtggcatttgtcgagagtattccattctccgagacgcgcggttatgtgaagaacgtgctggcttatgacgcttactaccgctatttcatgggggataaaccgacgttgatgagcgccacggaatggggacgtcgttactgatccgcacgtttatgatatgctatcgtactctttagcgagtacaaccgggggaggcattttgcttcccccgctaacaatggcgacatattatggcccaacaatcaccctattcagcagcgatggcagaacagcgtcaccaggagtggttacgttttgtcgacctgcttaagaatgcctaccaaaacgatctccatttaccgttgttaaacctgatgctgacgccagatgagcgcgaagcgttggggactcgcgtgcgtattgtcgaagagctgttgcgcggcgaaatgagccagcgtgagttaaaaaatgaactcggcgcaggcatcgcgacgattacgcgtggatctaacagcctgaaagccgcgcccgtcgagctgcgccagtggctggaagaggtgttgctgaaaagcgattgattttgtaggcctgataagacgtggcgcatcaggcatcgtgcaccgaatgccggatgcggcgtgaacgccttatccgtcctacaaatacccgtaatttcaatatgtttggtaggcatgataagacgcggcagcgtcgcatcaggcgcttaatacacggcattatgaaacggactcagcgccaggatcaccgcctggtgatagacgctggcgcgagtgagtttcccggcggtaaacacgccgatcgccccttccttacgaccaatctcatcaataccggtataacgcgacatcacgggaccaagcgcctcaccttcacgcactttttccagaatcaccgcaggcaacggcaaagtagccgaacgcgcctcgccgcgctggctggcgttttcaatcaccacccaactgaaagtgctgtcaccatcgatgccagcttcaatcgccacccaaaaatcagcctctggaagtaaacggcgggcattggctacccgatttcgtgcgccagcgcgcgtttcctcactgccaaagggctgttccggtacaccgctctcgacggcaacggatgcaatatggcaggatccttcgccgaagatctcgtgaaatgcctgcagaatggcctgaattttagcgggattggtggtcgcacagacaacttggtgcataatcagcattactcagaaaattaacgttacagcagtatacggaaaaaaagcatgttacaggtatacctagtccgccacggtgaaacgcagtggaacgccgagcgacgtattcagggccagtctgacagcccgctgaccgccaaaggtgagcaacaggcgatgcaggtggcaacccgtgccaaagagcttggcattacgcatatcatcagtagcgatttaggacgcacccggcgtacggcggaaatcatcgcccaggcctgcggctgtgacatcatctttgattctcgcctgcgtgaattaaacatgggtgtgctggaaaaaagacatatcgattctctgaccgaagaagaagagaactggcgtcggcagctggtcaatggcaccgttgacgggcgtattcctgaaggcgagtcaatgcaggagctcagcgatcgcgtcaatgcggcactggaatcttgccgggacttaccgcagggaagccgaccgctgctggtgagtcatggtattgcactgggatgcctggtgagtacgattctcggattaccagcatgggcagagcgccgcttacgtctgcgtaactgttctatttcgcgcgtggattatcaggaaagcctgtggctggcgtctggctgggtcgttgaaaccgcaggggacatctcgcatctggacgcccctgcattagatgagctgcagcgttaacgacggatcggaatcagcagttcacagcgtagattaattgggcgatctcccgctttggcatcttctgccgggtagtatcgctcaatatcctgacctttacggcgcgtcaggttgagcattggcatgcacgttccgtataccgtcaggataaactcctgcacgccggttcccagaccttcataggtaaacatcacatattcgccgccctgcagcatcaccggatgccccgtcagtacatagccatctgcctgatcctgggctaacgcggtggtatagaatacctcttgctcgtcgtctttatcctgactcggacgcgtttcattcaggccgtagagcaccggcggaatggtcggcgcgttgccgagaaaatcgtgccagaactgataacgcatttcatggcggaaatcagagatttgctccagcgaacaggagtagctctgggtaacaccaatcagcggcgtatcttccagggtgacaaatttgtgctctggcatagtgaattcacccaggcgtagcggcgggcgaataccaaaggcgctccattcaggagaacggcggtaaagtgcaggagtctgggcaaactgcttcttgaatgcgcgggtaaatgtctgttgagagtcgaagcggtattgcagcgcgatgtccagaatcggacgcgcagtcaggcgtagtgcgaccgccgatttcgacaaacgacgagcacgaatatacgcgccaatagcatggccagtgacatctttaaacattctctgtaagtgccacttggaataacctgctttcgccgctacattgtcgagcgacaggggctgatccagatgaccttccagccagattaaaaggtcgcgaataatgccggcctgatccataaaatatcctcatcctttcaacaacgagcacctgacatcaggtaattggataatagcattttttgctgttttagcattcagtgtttttttcttagtagagtatgttttagggcttgacggaaataaaagtattgagattttgttcttaatcaatatgttatttaccgtgacgaactaattgctcgtgtaatagataaaaatggtaacaatatgaaatacaagcatttgatcctgtctttaagcctgataatgctggggccattggctcatgcagaagagattggttcggtcgacaccgtatttaaaatgatcggcccggatcacaaaattgttgtggaagcctttgatgatcccgatgtgaaaaatgtcacctgttatgtgagccgggcgaaaaccggtggtattaaagggggattgggtctggcggaagatacctccgatgcggccatttcttgtcagcaagtcgggccgattgaactgtcggatcgtattaaaaacggcaaagctcagggcgaggtagtattcaaaaaacgcacgtccctggtctttaagtcgttacaggtcgtgcgcttttatgatgccaaacgcaacgcgctcgcttatctggcttactccgacaaagttgtagaaggttcgccgaaaaacgcgattagcgcggttcctgtcatgccgtggcggcaataacagaggcgatttatgcaacgggaaacggtctggttagtggaagatgagcaagggatagccgacacgctggtctacatgttgcagcaggaaggttttgccgtcgaggtctttgagcgaggcttgccggtgctggataaagctcgcaagcaggtacccgacgtcatgattctcgatgttggtctgccggatattagcggctttgaattgtgccgccagttactggcgctccatccggcgttacctgtactgttcctgacggcccgaagtgaagaggtcgatcgcctgcttgggctggaaattggtgctgacgactacgtggctaaaccgttttcaccccgcgaagtgtgcgccagggtgcgcaccttactgcgtcgggtgaagaagttctcgacgccgtctcccgtcatccgtattggacattttgaattgaatgaacccgcggcgcagatcagctggtttgacacgccattagcgctgactcggtatgagtttttattgttgaagacgttactcaagtcaccgggccgcgtctggtcccgccagcaactgatggatagcgtatgggaagatgcgcaggacacctacgatcgcaccgtcgatacccacattaaaacgctgcgtgccaagctgcgcgccatcaaccccgatctttcaccgattaatactcatcgcggcatgggatatagcctgaggggcctgtaatgcgtatcggcatgcggttgttgctgggctattttttactggtggcggtggcagcctggttcgtactggccatttttgtcaaagaagttaaaccgggcgtgcgaagagcaacggaggggacgttgatcgacaccgcaacgttgctggcggagctggcgcgtcccgatttgctctctggggacccaacgcatgggcaactggcgcaggcgtttaatcagctacaacatcgcccgtttcgcgccaatatcggtggcattaacaaagtgcgcaatgaatatcatgtctatatgaccgatgcgcagggcaaagtattgttcgattcggcaaataaagccgttggacaggattattcgcgctggaatgacgtctggctaacgttgcgtggtcagtatggtgcgcgcagcacgttgcaaaatcctgccgatcccgaaagttctgtgatgtatgttgccgcaccgattatggacggctcgcggcttattggcgttttgagcgtaggcaaaccgaacgcggcgatggctccggtcattaagcgtagcgagcggcgaattttatgggccagcgccattttgttggggattgcactggtgattggcgcaggcatggtttggtggatcaaccgctctattgcccggctcactcgctatgctgattccgtcactgacaataagcccgttcctctccccgatctcggtagtagcgagttgcgtaaactcgcgcaggcgctggaaagtatgcgcgtgaagctggaagggaaaaactatattgagcagtatgtttacgcattaactcatgagctaaaaagcccactggcggcgattcgtggagcggcggaaattttacgcgaaggtccgccgccggaagtggtggctcgttttactgacaacattctgacgcaaaatgcgcgtatgcaggcattggtagaaacgttactacgccaggcaagactggagaatcgtcaggaagtcgttctgactgctgttgatgtggcggcattattccgccgcgtcagcgaagcgcgcaccgtgcagttggcagaaaaaaaaatcactctgcatgttacgcccaccgaggttaacgttgctgctgaaccggcgttactggagcaggcgctgggaaatttactggataacgccatcgattttacccccgagagcggttgcatcacgctaagcgccgaagtggatcaggaacacgtcacgcttaaggtgctggataccggtagtggtattcctgactacgcgctttcacgtatttttgaacgcttttactctttgcctcgtgcaaatgggcaaaaaagcagcggtctggggttggcgttcgtcagtgaggtcgcccgtttgtttaacggcgaagtcacgctgcgcaacgtgcaggaaggtggcgtgctggcctcgcttcgacttcaccgtcacttcacatagcttcaaattcttcccacatagtcttcgtatcctgctgccattgcaaaggagaagactatgttgaaatcccccctgttctggaaaatgactagcctgtttggtgcagtattgctgttgttgattccgataatgctgattcggcaggtgattgtcgaacgtgctgattaccgtagcgatgtggaagatgcgattcgccaaagtaccagcgggccgcaaaaactcgttgggccgctcatcgctattcctgtgaccgagctttatacggtgcaggaagaggataaaaccgtggagcggaaacgaagttttatccatttttggttacctgagtcattgatggttgatggcaatcagaacgtggaagaacgcaagatagggatttataccggtcaggtctggcacagtgatttaacgttaaaagccgatttcgatgtttcgcgtcttagcgaactcaacgcgccaaatatcaccttaggcaagccatttattgtgattagcgtcggggatgcgcgtggtattggtgtggtgaaagcgcctgaagttaacggaacggcgctgaccattgaacccggcaccgggttagagcaaggcgggcagggcgtgcatatccctttacctgaaggggactggcggaagcagaacctgaagctgaatatggccctgaatttaagcggtaccggcgatctttctgtggtgcctggcgggcgtaatagcgaaatgaccttaaccagcaactggccgcatcccagttttttaggtgattttctaccagccaaacgggaagttagcgagtcaggttttcaggcgcactggcaaagcagctggtttgctaataatctcggtgagcgttttgcttcaggcaatgataccggctgggaaaacttcccggcgtttagcgtcgcagtaacgacgccagccgatcaataccaattaactgaccgggcgactaagtacgccattctgctgattgcactgacttttatggcgttctttgtttttgaaacgctcaccgcgcaacgtttacacccaatgcaatatttgctggtggggctttcattggtgatgttttatttgctcttgctggcgctttctgaacataccggttttaccgtggcatggataatcgccagtctgattggggcgataatgaacggtatttatttgcaagcggtattgaaaggttggtgcaacagcatgttgtttaccctcgcgctgttgttgctggatggtgtgatgtggggactgctcaactctgccgatagcgcgctgttgttgggaaccagtgtgctggtggtggcgctggccggcatgatgtttgtgacccgtaatatcgactggtatgcgttttcactgccgaaaatgaaagccagtaaagaagttacaacggacgatgagttacgtatctggaaataaggttgaaaaataaaaacggcgctaaaaagcgccgttttttttgacggtggtaaagccgattaatcttccagatcaccgcagaagcgataaccttcaccgtgaatggtggcgatgatttccggcgtatccggcgtagattcgaaatgtttacgaatacggcggatcgtcacgtctacagtacggtcgtgcggtttcagctcacggccggtcattttcttcagcagttcagcacgggactgaattttgcctgggttttcacagaagtgaagcatggcgcggaactcgctgcgcggcagcttgtactgctcgccatcagggccgatcaacgaacggctgttgatgtccagttcccaaccattgaacttgtagctttcaacgctacgacgttcttcgctgacagtacccagattcatggtacgggacagtaggttgcgtgcacgaatcgtcagttcacgcgggttgaacggtttggtgatgtagtcatctgcaccgatttcgaggccgagaattttatcgacttcgttgtcacggccagtcaggaacatcaacgcaacattcgcctgctcgcgcagttcacgcgctaacagaagaccgttcttacccggcagattgatatccatgatcaccaggttgatgtcatattcagagaggatctgatgcatttccgcgccatctgtcgcttcgaaaacatcatagccttccgcttcgaaaatacttttcaacgtgttgcgtgttaccaactcgtcttcaacgataagaatgtgcggggtctgcatgtttgctacctaaattgccaactaaatcgaaacaggaagtacaaaagtccctgacctgcctgatgcatgctgcaaattaacatgatcggcgtaacatgactaaagtacgtaattgcgttcttgatgcactttccatcaacgtcaacaacatcattagcttggtcgtgggtactttccctcaggacccgacagtgtcaaaaacggctgtcatcctaaccattttaacagcaacataacaggctaagaggggccggacacccaataaaactacgcttcgttgacatatatcaagttcaattgtagcacgttaacagtttgatgaaatcatcgtatctaaatgctagctttcgtcacattattttaataatccaactagttgcatcatacaactaataaacgtggtgaatccaattgtcgagatttattttttataaaattatcctaagtaaacagaaggatatgtagcattttttaacaactcaaccgttagtacagtcaggaaatagtttagccttttttaagctaagtaaagggctttttctgcgacttacgttaagaatttgtaaattcgcaccgcgtaataagttgacagtgatcacccggttcgcggttatttgatcaagaagagtggcaatatgcgtataacgattattctggtcgcacccgccagagcagaaaatattggggcagcggcgcgggcaatgaaaacgatggggtttagcgatctgcggattgtcgatagtcaggcacacctggagccagccacccgctgggtcgcacatggatctggtgatattattgataatattaaagttttcccgacattggctgaatcgttacacgatgtcgatttcactgtcgccaccactgcgcgcagtcgggcgaaatatcattactacgccacgccagttgaactggtgccgctgttagaggaaaaatcttcatggatgagccatgccgcgctggtgtttggtcgcgaagattccgggttgactaacgaagagttagcgttggctgacgttcttactggtgtgccgatggtggcggattatccttcgctcaatctggggcaggcggtgatggtctattgctatcaattagcaacattaatacaacaaccggcgaaaagtgatgcaacggcagaccaacatcaactgcaagctttacgcgaacgagccatgacattgctgacgactctggcagtggcagatgacataaaactggtcgactggttacaacaacgcctggggcttttagagcaacgagacacggcaatgttgcaccgtttgctgcatgatattgaaaaaaatatcaccaaataaaaaacgccttagtaagtatttttc
